United States Patent Application Publication US 2026/0191916 A1 - sequence listing, part 56

SEQ ID NO: 273 - DNA, 4373401 bp, Lactonifactor FBI02339 (residues 1-2,186,701 of 4,373,401)
  source 1..4373401: mol_type = genomic DNA
ggacgtgttctttctaaaaagaacacgtccccttttttaccctttagactgctttgcgcccgcagcactgtttgtatttcttgccgctgccgcatggacacgggtcattgggatatacttttttcactgctctctgcattggtttcttaggaccggattcgtctttattcgttccggttacctttgctacctgctctctttctactttctgctctacttttacatggtacagcagacgaagtgtatcctcctggatcgcagcggtcatggcattgaacatctcatagccgctcatcttatattctaccttcggatccctctggccataggcctgcaggccgattccctgacgcagctgatccatgtcatcgatatgatccatccacttccggtcgattaccttcagcagaatgacacgctccagttctctcagctgttctggttccgggaattccacttctttttcttcataaatctttactgcctcttccttcagatcctgtttcagctgatttttcttaatcccatctaccttctcttttgtcactggttttaccggtatgatgggaattaatacactgttcagttcgctgagatcccactcgtcgttctctacgtcgtcagagatacacatatctaccgtactgtccacgatatcagtaatcatcttatagatagactctctcatgttctctccgtccagaacacggcgtctctctttgtagataatctcccgctgttcgttatttacctggtcatattccagcaggttcttacgaattccgtagttattgctctctatcttcatctgcgccttttcaatggcactggacagcattttatgctcaatctgctcattctccgcaacacccaaagatttaaatacattcatcagcttttccgaaccaaacagacgcatcagatcgtcttccaaagaaatatagaatctggattcaccgggatctccctgccgtccggaacggccgcggagctggttgtcaatacgcctggattcgtggcgctccgtaccaataattttaagtccgcctgcttctctggacacatcgtccagcttgatatctgtaccacgcccggccatattggttgcgatggtaaccgctccggcctctccggctccggctacaatctccgcctccagctcatggaacttggcattcaataccgtatgcttgattccctctcttttcagcatgccgctgagaagctcggagttctcaatggtaatggtaccgaccagaaccggctgattcttggcgtgagcctctttgatctcctccactacagcccggaacttttccttctgggtcatatataccgcatcgtcgtagtctttacggatgacaggcatattcgttggaatctctacaacgtccatgccgtagatttccctgaactccttttcctctgtaagagccgtacctgtcatacccgactttttggtgtatttgttaaagaagttctggaaggtaatggttgccagggttttactctcccttcttaccttcacatgctcttttgcctcaattgcctggtgaagcccgtcagaatagcggcgcccgggcataatacggccggtaaattcatctacaatcagaacctgatcatcctttaccacataatcctggtctctgaacatcagattgtgcgcccgcagagccagtataatattgtgctgaatctccagattctcaggatccgccagattctcaatgctgaagaacttctctactttcttgacgccctgttctgtcaggtttacaatcttatctttttcattaacgataaagtccccggtttcaatgatttcctctcccataatagcggtcatcttcgtcatctcaccgctggcctcgccccgttccagctgtctggcaagaatgtcacagacttcgtagagcttggtggacttttcactctgtccggatataatcagaggggttctcgcctcatcaatgagaaccgagtcaacctcatcgatgatagcatagtggagatctctttgcaccagctgttctttgtaaattaccatgttgtcacgcaggtagtcaaagcccagctcgttgttcgtcacataggtaatgtcacaggcataggcagcgcgtctctcgtcattattcatggaattcagcaccacacctaccgtcagtcccaaaaattcatgaaccttgcccatccactccgcatcacggtgcgccaggtaatcattgaccgttacaatatgcaccccttccccctccaaagcgttcagataggcaggaagcgtagataccagtgtcttaccttcaccggttctcatctccgcaatacgcccctgatgcaggataataccgccgatcagctgtacccggtaatgttccatattgagaacacgcttggccgcctctctcacagtggcaaaagcctccgggagaatatcatccagagaagccccctcagagagccggtttttgaattccctggtcttttcccgcagctcctcgtcactgagcttctgcatcttggggcgcagagcctcgatcttgtccactgtagccaccagccgctttacttctctttcactatgggttccgaatatcttgtttataacattcataaaaaatactcctattttttcttcgttttcaaattaagtcatagcactattgttcattttagcactttcctatgttgaaaacaataaatttttcgtgaacaaaccatgaaaaagcacccgaaagccctctgcaggctccgggtgccggtgattcttatcttagaactctggttcaatcaaaccataagtattgccttttctcttgtataccacatttacttcctctgtctccgcattcaggaaaacatagaaattatgccccagaagctccatctgcacacaggcgtcttccggatacatgggtttgaaaccaaaacgtttggtacggataatctttatctctccatcatcctcataatccttttccacataagccttctggaagtgagtatattcttcctgctcctttacgccctgctctctctggatgattttgtttttgtactttctcagctggcgctctatgacctcttccacaagatcaatggatacgtacatatcattgcttacctgttctgaacggataatattacccttcacaggtatggtaacttcgatcttctggcgctccttttccacgctgagcgttactataatttccgtatcttccgtaaaatatctacttaactttccaagcttgtcctggactgctgtgcgtaacccgtcggttacttcaagattttttccacttatgataaaattcatgctgtcaacccctttaacgtgtattttacaaatccctttggaattctttaccaaggtcatttgtaatgtaaccccattatatcaatattcagtttttattgcaacggaatttagaaaattttcattattgtattatatttgacagttatttctgcagcattctaagacgtcctcatatttcatgggacctccgaacaagtcaagtgcactgccaatggtgacatccaggcggccttttcccaactctgccagagtttttaagtcctcaaaggtacccacaccgcctgcataggtggtcggaatctcactgccctctgcaagcagggatactagaccggtttcaatccccgatgcttttccctccacatccactgcatgaaccagaaactcatcgcaaaaaaaagcaagctcccggagcacacttctgctgattgtcacctctgtaaatttctgccaccgatccgtaactatataatagttcccatcacgctttctgcagctcaaatccagcaccagatgttctttgccaacggtctcagccatccgctccaggttttgcatggatacttttccgtctctgaatacataagaggttacgataacatgacttgctcctgcctgcagaaactcaaggctgttttccggtgtgattcctccgcccacctggaggccgccgggatactccctgagtgcgtccagagcctggcccttcgtctgcggataataagcagatgccagagggttcagcagaataatatgccccccccgaatccctgactccttatacatctttgcgaaaaagggcgcatcctgttcggctacaaagttttctgccgccatgtcattttcatccttcaaagtccccccgacaatctgttttactttaccattatgtatatctatgcaagggcgaaaattcatccgaaaacctcctgttactactatatggggtatcataccatgttaagactaattgatcaatacggctttacccaaaaagggagggcagagagtacactccctgcccctgtacctttattttgcctgggtattattttctgttgttgtgttgttggcacctggatctgtgttgtcattggcattgccattggcgtcatttcctgtgaggtcatctccaagatcctcaatgccgtcgcctacatcctcaacgccgtctttgatgtcatcgccaacttcatctacaacaccgtctccgtcagcgtcatttccctctgttacactgttattgttactgtttgtgtcattaggagtattgctgtcagtgtctttcgtatccttgttgtcggttgttccgttttctgtcgtattgctgccgttatctccgttgtcattattgcttccgcatcctgtagcaaagctgagagtcagaactaacagggcaccaagcaaaagtgttttacatttcttcatcactatagtctcctttgattcattatttttttatcttcagtgttattaatatgtgctgatttctcctgatttattcgcaggataaaatctttgaatccggaaactattttataaagaaaaaagacccacgagtatatggatcttttcccaattttttcatattattttgcctggattacatcagccatattatacatccctgccggctttccacccaggaacttggctgcttccacagctccttttccaaacacagtcttggaatacgctgtatgggagaacgttatgacctcgtccggacccgcaaagatcacatcgtgatcccccacgatggtcccgcctctgaccgcagagattcctatttcttttggatccctctgctctctcctctggcttctgtcatatacataatgatactggtgatccatggcttcattcaggctgtctgccagcgcaatagctgttccgctgggagcatccagttttaatttgtggtgtttttccacaatttccatatcaaatccggcttctgccaaaaccctggcagcgtcctgtacaagctttaacagtgtattaattccaagagacatgttagcggaacgcagcactgccacctccccgctgaccctccgtgctttttccagctgctcttcactgagtccggtggtgcacaaaacaacgggcagttttcttctctcacagtaatccagcaggcggtccgtcgcttttgcagaagaaaaatcgatcaaaacatctgcctctgcatcacaggtatcaatatctgtaaatacaggatattcacaccggccattatctgccatatcaataccggccactatctcggctgccggatcttcttttactaaaccggaaatcacctgccccatatggccgcagcatccgtgcattataatctttgtcatctgtttatccccttttctgtcctatgccagctctataccgaaatccttcatagtctgggctaattttttctgattttcttcttccatagttgtcaaaggcattctcaatggtccaacttctttccccataagattcagagcagccttcacaggaataggattgacctcactgaacagcgcattcacaaggggaagcgctctgagctgcagtgcacagctgcctttcacatctccttccaaatatttagatacaatctcgtgggtttctctgggcgccacatttgacaatacggagatcacaccttttccgcccagtgacataataggaacgatctgatcatcatttccggaatacaggtcaaggtcatctccggcaagctgcatggtcttagccacctgtgcgatattgcctgttgcctctttgatacccgtaatgttttctacattcttagcaagatatgccgcagtctcaggcagaatattgcatccggttctgctgggcacattatacataatcagcggaatgctgactgcattcgcaattgccgtataatgggcgatcagccccttttgagttgctttgttgtagtaaggagtcacaatcagcaggccgtctgcgccgaatttctctgcctcctgtgaaagatagattgcagtttccgtacaattggaacctgtgcctgcaacaacaggtattcttttcgctaccttgtcaacggtatatttgatagcttccagatgctcctcatgggtcagggtagaagattccccggtagtgccgcagatgataatggcgtccgttcccccttcaatctgaaattcaatcaattctcccaatttgtcgaaattaacttttccattgtcatacataggggtaacaatcgctacgcctgctcctgtaaaaatagccataataattcctccttcatttccactcggttttaggtttgcatataattctgctaataaagaaaagaggcaaacccgtaagccgcctctaaagaatactacattgtatcacatttatgaattcttcggatagcgcaccatcttacgatgacagtcatgaaattattcacttcatgcccaaggtataggactgcagggttcccaccctttcggcgccgtttccttttttctatcgtcatctgtgcctgtcacatctgataaaatactcataaaaagcgcaacctctatcattctttatataatttacagtaactatagcattattaaaaatccttgtcaatgcctcttttataaaaatattatattcaaaaacaaggaggatgggataactttttcaccgcccccctacccctcaaacatcaaatcatacgtatcctcacgcactctaagtaaataataaactgcctcattgtatggcgtgggaatcccgtacttttttccttccctgcacactgccccgttcaggaactctacctctgtctttctctgtttaaagacatccagtacggttgaggtaaagtgatgctcgttaagaggcacctgggccatattttcacgctcttttttccagtattcctccggatccatgggtactcctctggcggatgcaacctcacagacctcacgggccagttctttcaggagctttctgccctcctcatgtctcataaagtcctcccctgccagctgtaccagagcacagggggcattatacagtatattgataaacagcttgtcccacataattgcctctgtctgctcagacagagctgcggggaaccctcccctctccagtatcttctccatctcctcaaagagatgccggtatggggtgtccttctctagaggggagaaccagacgcccttgggactgtacggaaattttacccgccctgcgattcttcccggcgctctgagggtggcagatgcttttaacaccccatacccaatctgccctgtggagaagaattcctttagtatatccacatttcccagtccgttctgcagagagattacaaccgtatcctctccgaacagttcccggttggcttcaatgctgcttttcgtgttcattcccttaaccagcagaattaccagatcacaggttcctgcctttgaggcatctgagacagccatggttatttttacggtttcttcttcctgttcctccagttccatatggagcccttcccgttccacggcctgcatatgcttcacatagggatctacaaagtatacctcagcaccgcccttcatcagatgggcgcccacaagggatcccatggcgccggccccaagaattcctatcttcatacacttcctccctcctcatctgcagctctctggcttctgaccgcctccattccccgtcggaatgccgcaatattcagctttgcaatctggggctttttcccgaaggcagactggagcacctgctccatcaccgagggttccaccccccgggtagcttccaccacagcccccagcataatcacatttaaaagcctgtcatttttaagttcctccgcaatatcggatgccggtataaggtatacagttcccttattctcctccggcatggttctgaccagagaggtatttacgatatagcttcccccgtcctttaaatactggctttgggctgcacaagattcctcgtcaaagaaagccatgcagtcataagatgctgtcacctgcgctcccacttctctgtcagagagaatcaaagtggtgtaagtatatccgtttctcatggcaggcgcatattcagaataagaggtggcatattgatgcgcctccaccgcggccattcctaacagcttccccccaaggactacaccctggcctcccaggcctcctaaaaagattttattttccatgcttattctcctttaaaaacaccgattggatactgactctccgacatttctttaatgtgttctatggactggagaggcgtcatatgccagttcgtgggacaattagacaagaactcaagaaaggcaaaccctttgtgttctgtctgaagacggaatgctttctctaaggccttttttgcctgcattacatgtttcggatcgtataccgccatccgggcagaatactgggtcccctccacctgagccagaatctctgccaggttaatgggatagccttcccggtcagccattcttccacgggggcaggtagtggacttctgtcccatcagcgttgtgggcgccatctgccctcctgtattggcaaacagcgaattgttcaccataatcaccgtaagattttcatttctggcggccgcatggattacatcgccaatcccaatcgcggcgtccgccccgtcgccgtcccagcacaagacaaaatggtccggatccgcccttttgatccctgttcccacagcagccgatctccccagccctaccatcacggtattaatattaatgcagaaatcctgctggggtccgcatcccgggggaaacagcagtgtcgtattttccggagcaatcttcaattcatccatggtgtccagaattaattttcctatcaggccatgcatacacccagagcacaggggatggctgcccttgtatagtttggatcgttcataaacaacctgttccatcagtcaccgctcccttccatctgatgttttacttggcagactacctcttccggcgtcaccagcataccgccgcctctcccgtagaagtccacctcaatccggccttctacactccgttccacatcctccagcatctggccggggatggccatttccacacatattgccttttttatccttccgtaattcaggctgccaatctgttttcggggaaatggaaaaagtgtaatggggcggaacagccctgcttttatcccttccttcctcagctgccgtactgcttctcttacgatacgccccacggacccgtaggcaaagagaactgcttctgcatcctccagcataaattcctcgtatctgatttcgttttcttcccacgctttatacttatcggccagctttatgcagaattcttcctgagaagatacaggcagaagcatagactggcagattcgtttatcttcaaacttcatactgtcccttttggtaatcagccaggaagatttgtcgggtaatgtggaaagctctctgagaggcggaagttccaccacctctgttgtggccgccagaagcttatctgtcagcaccactacaggcgtccggtatcgatctgcaatatcaaaactctcataaactatgtttaccgcctcctggatcgtactgggcgaaatgacaaaagctcggccccctccggcgcccagcccctttaccgcatacaggtaatcctggctgcatccgccgattccccccattcccggccccggtctggccacatcaatgaaaacacagggggcctcacatcctatgataaagctgatgccctctgccatcagagaaaaccccgggcctgaggtactggtcatacagcggagccctccgcagcttgcccctaataaaatattggcagacactacctcgctttctgcctgaataaagcttcctcccacttccggaagccggccggataaatactccggcatagggctctggggagtaatgggaaaaccggcaaacagccggcacccggctgctaccgcagcttctgccatagccacattgccgtctataaatttggttgacataatttccctcctattccatctcatagttcctgatactctgacgctccggaagggagcacatttgtcttttcggcccagccggaggcctgcgtcttatctgctttcgcgaaaaacagtaattgccgcatcaggacacattaaggcacatactttgcatgccgtacaggctccttcccccgcttctgtctcagcatatttaaaccccagggaattacatttactgcccagatgaattatctccttggggcagtaagcaatacagaaaccgcatcccttgcacagctcctgatcaattacaattcggttcatagttctacctccgcagtacttagctaaattatcagctgctgtttcgcctgatacataagttcctcacgaaacttcggatgtgcgatgccgataagcgcttttgccttttcactcagtgtacggtttctcatctccgccacaccatactcggttacaataaaatgcgtgtcattgcggggggtggtaaccgcagagcctggaggcagcgtcagcgtaatttttgatatactggtgccgtccgccttttccagactggatctcatggcaataaaggattttccgcccttggaaccccgcacccctctgacaaagtcaagctggccgccgctccccgcataagtatcaagcccaatgcactcagagcatacctggcctcgaaggtctaccgccatacaggaattaatggatatcatattatcattccgggcaatggtttccgggtgattcacccaggacagacgctcaaaatagagttccttattctcatgaacaaatttataggtgtctctggttccctggagaaatcctgccactgactggccgggacggacttgttttcggctgttatccaccacccctttttccatcagtactctcataacgtcggtaaagacctccgtgtgaattcccagatgtctgtgatgtcccagaaaatttccaacagcgctgggcacgcctccaacccccagctgaatcacagagccgtcgtctatccgctccacaatatgctgagccattttcttttctaattccgtgggaaccatatccggtatctccgccagcacggtatccatttcacacagtgcctcggcctcgctgatatgtattctgttaaagtctgtgttaatcataggcagattccggttcacctgcagaattacctttgccccgctgtcgatggagactctccccggtccgggacagattcccatatagagatacccttctgagtccataggggatacgtgacagaggacataatccggccgtattctctcccggaacatctcctcgatattgctgaaatgggtgagaaggtgatctatttttatccctcttctgattgcctgggcctcgggttttgtcatatagctaatccccacagaaaagttttctttggccccttcgctgtataaccgctggtagatctcagggtttgcaaatcccatcatagaataaagatacaagggatgaaatctctccctctgtttataaagcgcctccgccagggccgccggttcgctgcacagaagaacgcggctcagggaggggattctgcccaccgcctcgtcgggagaacagctcttttttgtatattccttaaaaaaatccatagttctgtcacctcttttcattaggaacgcagcacagaaacctaataatcctgaattactcttgcagcattgacatacaaattaacatgaataatccaggattatatagtctccattgctcagacagcagcagatgaaactaatttctttttattctttttccattttgctacgtgagacaccgtggcagctgcaaagagcgccaggccaatgatgcacaatatattcatgctcataaagatatagagaatcaatgtcaggaagctgaggaaaaacatcgcccgctccagcagtgtaaggtccgtacagaaataatttacccagcagaactgcgccgcgacggtaagtacaatgaccgccaggagctggatataggaggtaggatccgtcaggcttccctccagcagcagaaccggtgcatatacaaataaaaatggagccaggaaggaaacgccgcagatcttacagcactctatagcagtcttgccataaggtgtcccggatatctgtgtgcccaccagagtggtcagggctaccggcggtgtaatcgttgagtaggaagccggatagacacagaagaagtgagcggtggcataggcaatccccagcttctgcagggcgggaaccgcaaatgctgccgcggtaaagtacgctgccacagacacccctgccataccggctataatactggcaatatagagaatcaaaagggccaggaataaagacccgtggctccagctctcaataccagaggtaagttttacgcccattccgctggtggtgaaggtacacacaagcataccgatgacagcacagcaggctcccatctgggccccctgctttgctccttccacaaatccgcctatcagctcacgaaactttggtctgtgtctctttggagccagatagctcataacaataacagagataatagcccaaaagccgcacaccataacggatttcccctggatcagcagggttataataatgataaaaggtaccacaaatgcggggcctttccacttcattacatcccagtccaccacaggcttttccacaatccgtgttctgagctccggggtcttcagggcgtgaagatgggcatacagagacagggagaggtaataaagaatggcagaaataatagccattttacagatggtccaataggggattccggcatatccagccatagaaaaagctacaattcccataaccggcggaaggatctgtcctccgttagaccccacacaggaaatggcagtagcagtcgtaggattatagccgttctttttcatgttatcgatacaataaggtccggtcatggttacatttgcaatggcatttccgcataccatgccaaccattgccgtattcaccacgctaatctgagcactcccggaccggaaacgtcccacagtccattttccaaattcgccgaaaaatttctgcactcctgtggctgacataacaccgccgaagacacagaataaaaaagtataattcgccgatatggtcagcgtactgtcgtacagcccggtagtcagccctatggaaaggttggagattgtcctgctgaagggaagggcactcgtgtgaaacggtccgggcatcatctttccgaaaaacggatagatgcagacaataattacaagtatggggataaattttccaaaccccagccagcatgcatacagcgccaggacgatcatggtacatcccacgacaatatccagatttgtgctgacccactgacggactctcagagcctccagattacagcacacatagatggtaaacgcaaatgtcagcgccactgacaaaaataaaaacgcattatgtattttactttcgctctttttcgctgtggacaaaaataaaattataaacgaaaaaaacatatgcatggtcagatatacttcctgctgcagaaacgatttcttagcacatatcatatgcatcatgcacatagccagacagaacacaaccagcagataatcatagactttttccggcaggacacccccgtaagctttgacttccaccgcctgctctatggcctgttctgctttatctttctttttcttgccaaatcccatctgtacacctcctttgagtacttatggctgtttcatttattcttataaatatggtattattttcacttttactatctttctttcaggggcgctgcggatgtcgctctctgccgggacaggatacaaaaagatacatccgccgcactcttccaatatacataacaaccgtttaaaatagttcaatacaaaatgagtataccgtgttcagataatcagtactttcgcatcatctgctttgcttcagcctcgcctattatctatttcggaacataggtctcataaggagtttctctgtaatttacttcaatgcccttctcttcatagaatttctttgccacatcggagatcagctctggggtatcaatcttgcccatattatcttttgtacagtatctgccttcatccttatattccgcaaattcatcgcagtgttcatagtagatattcaaaagctcttcctgaacatcctccgggaaatctttgtgtacataccagcacaggtaatccgccataatggtaacctcatcattaaatttggagtcatactgcccgggctccagagtcataacgcccgggaggagggaatggttcagagcgtcctttgcttcaaacagcgccttttcgtccagggatacataataaacatcattgcgggcatatacctctgccaaggctgccatctgcgtccactctgttgcctccgcattgagtgccataccgccggataagatggcgtctactttcccgtcagccagcgcagtggcagaatccgcaaaggaaagatattcatatttgggctcaatccccagaacttcaaacatttttgtggggatatcaacggccggaacattgggtttggttcttagagcaactgtcttgccgtctaaatcctggagtgtctttatattctcatccagtgtaaggaaaacattggataccagtccatagccgatcagacagcgaaggtcataattaggctcagtaaaaggatcttctcccaggattgcatccacgccaatcatataccccatcacgtgttctttatagttatcatccgctaaaaccatagaagctgtctggtctggtcccggagactccatagctgtggccttcagccaggagctgtatttgttaattaaatctgcaaaggcaacaccaagaacataggttgctccgccctgagcgtttgtatagatctcaatctcatacggctcatggtctggatctgatttccagccgcttcccgaatcagcactttcctcaccggcatcgtcttttgcctcttctttgtcgggttccgcatctccggtctccgcagcattggaagcgtcttcgctctttccgtcatccgctccgcatcctccaagcatggaaacagccatagcggctgccattaagagtgctaccagtttttttcttttcataagtacttctcctttcttcgatgaaatttcatcattttttcgtggtcccgcacatagtagtactgattttttcatcgtaatgcacaattttctctcttcattttgtattttcttgtattttatagtcaaatactaacaaacgttctgaaaattaacaattccaattttggtatctatttattcgttttaagaatacttcctactttcatatatccattcaattctgtatattctctctggaatattcttccaattttccccaaaacgggaaatggaccccagcacctttcggtgctgaggtccataaagtccggctttcatctctatttattatcgtcttcctgcttttttttctcattttccatgctttcaaatatcgttattgtatccacacaatccctgatttcttcacacatatgataaccggtaagaatcaaacctgtgtgtttgtccttgcattctataagagtcttcaattcctctcccgttatgatgccatgttccactactcccagaatctcatccagaattaataagtcacattcctcggttaccagaaccttccgtgcaaaattcagaccattcttaatattccagtcctcttcctgcttttcttcctcggtcagttcctgataatacttctcattcttctcaaaacggaatacttttatctctggctcaaggcgttccataaaattcagttcatccattgctcttcccttaagaaattgtatgagaatcactgatttgccctgacctacagctctgatagcctggccaatcgcaaccggcgtcttgcccatgcccagcccacagtatacctcgactaaacctttttccatatttttacctcttccagacctgtccctacacgtctgtttgaaatcccgcagccggccaaagagtctcttctattgataatatctgccgactttcatcagataacgtgtatatattactacacctggtagaagattgcaagatttgctaaaaataaaacggttttattccatatattccagcttgcttacggatacttcgtaggctattctcttttctgtctcactctctccaatctttttgatatactctctgctttgaatgcggccccatacaagcacatgaccgcctactgtaaatgccgaagcatacctggcatttcttccccagcagatacagggtatgtaatctgatttgccatacggccggtttactgccaaaagcaggtcggcaatctcccgccccagcggagtcttgcggtataccggcggcttacagatgtagccatccagaaaaatctggttggtcttaatggagtcgtcttcctcctccacaaaacttaattcccgtacaaatacggacagcacaaggcggttctttttctcctcgtgacggttgtaagagcggaattgtccgtgaacctggatgtattccccctcatagtcctgtgtcacatcaatgagacgctccgatatcatcagcggaatgcggtcttctgaatcacttagtcttttcaccataaggtcaagcgtgtaaaagccttctccgaatacctgatgactaaatgtgaatcctgatgcgattctccccataatggatacctggttgttttcaataatcttatctgccatgaatgatagttccccttcctctttgtggtattttgtctatatcatatttattctccggcagaacattttagaactaaaaaaatgaaaaatttttgacctcttgaatgtgacagggttgtatgctaaaatttataagttaagaatttattagttggctatacttcttactatagaagagaggatgtaacaatgaaaataaaaagagaagatgttaggaacgtggctattattgcacacgtagatcacggtaaaaccactctggttgatgagctgctgaagcaaagcggtgtttttcgtgagaatcaggaagtacaggaacgggtcatggactccaatgatatagaaagagaacgtggaatcaccattctgtccaaaaatactgctgtttattataaggacactaaaattaatattatagatacccccgggcacgcagatttcggcggtgaggttgagcgtgtgctgaaaatggttaacggcgtaattctggtggttgatgcttttgaaggcgccatgccacagaccaaatttgttctgaaaaaagctctggagctggatctccatgtaattgtatgcataaataaaatcgatcgtccggaagcacgtcctgacgaagtgatcgatgaagtgcttgaactccttatggacctagatgcctcggatgagcagctggattgtccctttctgtatgcttcagctaaaagaggccatgcagtcctggatctcaatgacgcgccccacaatatggagccgctgtttgagactatcctgaaatatattcccgctcctgagggagacccggatgcaggaacacaggtattgatcagcaccatcgactacaatgaatacgttggccgtatcggcgtgggaaaggtagacaacggaaccatttctgtgaatcaggaagttgtcattgtgaaccaccacgacccggacaaaaagaaaaaggtcaagatcagcaagctgtacgagttcgacgggttaagcaaaacagaggtttcttctgcctctgtgggttctatcgtagcaatctccggaatctctgatattcatatcggggataccctctgctctcccgacaatcctgatcccattcccttccagaagatttccgagcctaccattgccatgcattttatggtaaatgacagccccctggccggccaggaaggtaagtatgtaacctcccggcatctgagggagcggctctttagggagttgaataccgacgtaagccttcgggtggaagacacagacactaccgaatgttttaaagtgtccggaaggggagaactgcatctttccgttctgatcgaaaatatgcgccgggaaggatatgagtttgcagtgagcaaggcagaggtcctttaccatacggacgagaggggcaagcttcaggaacccatggaaatcgcttatattgacgtgcccgaagagttttccggaacggtaatccaaaaactcagtgaacgcaagggagaactgcagggtatgagtcttgccagcgatggttccacccgtctggaatttcacattccttctagaggtctgattggattccggggtgagtttatgactgccacaaaagggaatggaatcatcaatactgcgtttgacggatacggtccttataagggtgatatccagtacagaaagcagggttctctcattgcctttgaatcaggggatgctgtaacctacggcctcttttccgctcaggacaggggaaccttgttcattggaccaggcgagaaagtatatgccggcatggtcatcggccagaacggcaaggcagaggatattgaactgaacgtatgtaagacaaagcacctcaccaatacccgctcctcttccgccgacgaggctttaaagctgacgcccccgaggatccttagcctggaacaggccctggaatttatagacagtgatgagcttctggagattacccccaacagtctccggattcggaaaaaaatactggattcccgcatgaggaagagagaaaatcgttaattttttgtttatattttgtagaattttccagcacgtacaattttcagattaaagacaaacgttctgtcacagaacggaaaggcatcgaatattttttgattataagcgctgttatggcaattcatttgcctgtacagtgcttattttgcgttaatttttcataaagatttttcaattttttattatcacactgttttttcctgtaattgtattcctttttcttgtttattatttaacttttcttcctttcgggtcaattctgtgttatactcaacctatgaaaattcaattcaacaaaagttcaaaaaagcctgtttctgaagaattttttcccaaaaaatgtattgactatattttaacaatgaggtataatccctttaacatttgttaaaatattatcaatcacaagaagcttttttaccatttttctattcaatttaaggaggattaacttatggcaaaaaaagaaacaaaagttccaactatcgtggacagcccggagacactggcagctaaattagccgcaatgaaagaggctcagaaggttttcgcgacttttactcaggaacaggtagacaatattttcctggccgcctctatagcagccaatcagcagcgtattccattagccaaaatggctgtggaggagacaggtatgggtgtggtcgaggacaaagtaatcaaaaaccattatgctgcagagtatatgtacaatgcctataaaaacacaaagacctgcggtgttatcgatgaagatccggcatacggaatcaaaaagatcgcagaaccactgggactggtcgctgcggttatcccaaccaccaaccctacttctactgccatttttaagacccttatttgtctgaaaacaagaaatgccattattatcagtcctcatccccgcgccaaggcttgtaccattgaggctgccagggttgtgctggaagcagctgtaaaggcaggggcaccggaaggaattatcggctggatcgacgtaccttctctggagcttactaaccaggtaatgcaggaagctgactgtatcctggctaccggcggccccggtatggtcaaatccgcatattcctctggcaaacctgctatcggtgttggccctggaaataccccggtcattattgacgacagtgcggatataaagatggctgtatattctgtcatccactcaaagacctttgacaacggaatgatctgtgcttcggaacagtctgtcactgttctggccggcatctatgaggaagtgaaaaaggagttcgcctacagaggctgctatttcctgaaaaaggatgagctggacaaagtccgcagtattatcctggctccgtccggtacagtcaatgctaagattgttggccaaaaagccgcaactatcgctgagatggccggagtaaaggttccccctgagactaagatattaatcggtgaggttgattctgtagatatctccgagccatttgcccatgaaaaattatcaccggtacttgctatgtacaaagccaaaacctttgacgaggcccttgacaaggcggcaaaattagttgcggacggaggttacggccatacatcctccctgtatgtaaacccggcggagaccgaaaagatggcaaaacatgcggctgccatgaaaacctgccgtatcctggttaataccccttcctcccacggcggaatcggtgatctttataactttaaactggagccatctctcacactgggctgcggttcctggggcggaaactctgtttctgaaaacgtcggagtgaagcacctgattaacatcaagaccgttgcagagaggagagaaaatatgctttggttcagaacgcctgataaggtttactttaagaaaggatgtatgccagtggctctggatgagctgagagcagtgtacggcaaaaagaaatgcttcattgtaaccgacaccttcctctataaaaacggatataccaaacctatcgaagataaattagatcagatgggaattcagcatacctgtttctatgaagttgccccggatcctacgcttggctgcgctactaagggcgctgaggctatgagacagtttgagccggactgcattattgccctgggcggcggttccgccatggacgccggcaagattatgtgggtgatgtatgagcatccggacgcagactttatgaagatggcaatggacttcatggatatccgcaagagagtttatactttcccgaagatgggtgagaaagcgttctttatcgccatccctacttcctccggaacaggctcagaggttactccttttgctattatcaccgatgaaaagacaggaaccaaatatccccttgcagactacgaattaatgcctaatatggcgatcatcgatgcggataatatgatgaatcagccgaaaggcctgaccgccgcatccggtattgatgttatgacacacgcacttgaggcctatgtttccattatggctaccgactacacagacggtcttgccctgaaggctatcaaaaatgtatttacatatctgccaagagcctttgaatacggagctgcagatgtggaagccagagttaagatggcagatgcggcgtgtctggccggtatggcttttgccaatgccttccttgggatcaaccactccctggcacataaattaggtgccttccatcacctgcctcacggtgtggcaaacgctattatcctgacagaggttatgaaattcaatgcggccgccgctcctacaaagatgggtaccttctctcagtatcagtatccacacgcactggagcgctatgcggaagccgcccgttttgcaggaattgtgggcaaggacgattcggatacctttgacaaattaattgcggctctggaagagctgaaagaaaagataggcattaagaaaaccatcaaggattacggagttgacgagaaatacttcctggatactcttgacagaatggtggaacaggcttttgatgatcagtgtaccggagcgaatccgagatacccgctgatgtccgagattaaggagatttatctgaaagcatactacggaaaataagacttaaccaaaaaaccgcccggcagcagtaactgtcgggcggttcctttgctatgtaattatttctattattctaccgtctgctctccttctccgaagtaggagtaagacttgccgttttccagggtaattcccttcgcttttgccagctcactgacggtaaccagcttatatcctttttctaccaatgcaggtataatctgctccgctgcctctaccgtaaactcatggatatcatgcatcagcacaacagaaccatcctgcacattattcagcgtaacatctatggtattctgtacatccttcgtcttccagtcttttgtatcaatactccacaggacaaccggcatcccaatctgggccaaaacgtcagcgttctgggctcctccaggcgtacgcattacagttgccggttccccgataatattcttgatcgcttcatttgtctgtgatacttcagtgcttacattcccgatatctatctttgtcagtatctggtggtcgtaagtatggttgccgatctccatcccaaggtccttttcccgctttacctgttccggaaacttctctgcattctgtcccaggaggaaaaaagtagccttcgcgttgttagcctccagcacatccaggagccggtccgtatatttgcccggtccgtcatcaaaggtaagagctaccataggctttttaacagttgcgtcgtactggccgtctgcattgaaataaaaatcttccccgtccttttccagccagtcatccttgattatgtatccgctgtcatcaaaataatattggttgccgtctatctccttccatccgctgacatagaaagagccgtccgcattctgataccaggttcccttgtcatcggtctgccatccggtggacgctgatgccagcttttccatattatcggcatccctgatgggctgacgggccgcctcactgggatcgtccggggtcttggcctgtacatctacaaccccggcattccccgactgggtcttgccgccgatgaaacttacaagcttataacctcccacccctgcgatcaatacaagaagaaaggctatcacccccaggcggatacactttctgataaacagctgccgcctcagggcttctctccgttttctcattctctctgcccgtcttcgctgatattctatttcttccgaatccaagtttctctcatctatgttcattgttacctcttcccttttcttcagtcccttatttactctcttatgatacaaggttttaggaaaagattcaattacaaatctattaagtttctacaaaatatgacatttctactatttttgtcaagttttaccagtgatacccactttttcttgtctattattttgcaggttttcaagttcccgcctgcccccactataattccaaaaatacaggcgtatgatgcactgccggaaggaacttctccaggagatccgctgtagacatccgtatacttgaggtattaatacagggatggcaggcaaaggatggctgttccttaacctcccggtctatcaccagttgtacccggcacccggtatcgttcataagccccataacactcacagagccgggggtgagatccagatactcagccatctgcgcttccccggcaaaggatagccttgtagtgccaagcttccctgatacttcttttgttataaatttctttcttcccgggagcagtaaaagataatattctgtccctctggaattgcacaggaacagatttttacatatctctgttccgagaacccggtctacttccccgcaggcatctatggtgtacataggctcatgatcgatcctctgaaaaggaatctgaagcttttccaggagctcatacgtccgtatctctttttggggacgcccctgtatataaaggggacgtccttcttccagtgtcagcctcatagtgtttcgtcccctccgcccagcgttctgtcatgttctatttcctgtattttttcatacagccagttattgaccggtgtgggtatctgatgcctttttcccagctttcttagggtccccgaaaacagctccacctctgttttgcgcttagccttggtatcctgccgcatggacggcattccttccggattcagcctcccaaggatctgcatccactctgaaaattctctgtctgtaatcaccgttccctccgcttctgcaatacatcttgcctcttccatagcagacagagcggtgtcacggatctgcccctcctcctgcatctggcggtaattacaggcatatactgcagcggtctgattgactcctgtattaaacattagcttactccacaggcaatgcattatgtcctccggaatcagatacggaataccggctttcctgagaatattctccacagctgaaagcctttcatctcttttattatcccggttcccgattactaatgtgcccatattggtatggctgaactggtttccctctttcagggcatccatctcctgggccacgcagtacagcatcttatcctccccgtatctggctccaatccgctcctcacttgcgataccgttgagcagagataacagaatagtggaaccccctacaaagtttgccgtatcgtcaagagcttcctcaatggccgtatattttacggcgaatataagcagatcagcctgtactccctttgtatccggcgtcagatattgaaactctgtcttctctccgttgcagtaaatcccctccctctgatacttttcaattctccgggaatccgcaatgaaaaacacgcgctcacttcccaagtgcctggtgagctgccagccatacatgacccccaaagccccctgcccgataattcctatctttctaatctctgccatacgtttaactcctcactcactgacggggcggccgagtatctgccgcccctgaattttttatcacttatgcatgtctgatattggtatactctgagatttctctgctgatggtacacaagtcctctgtatccagttcatgaatgtcctcatgtcccgtgatcctggcaaatgtcttcaattcctcacgggtacagttcaggaaattggccacccgaaccgccgccgcgtcttcctgaaatctggccctcagtgcaggatcctgggttgccactccaaccgggcatttccctgtgccgcagatgcggtactgctgacaggccgcggcaattaaccccgcagaggccactgccaccgcgtccgctcccatggctatggccttcgcaaagtcagacgatacccttagccctccggtaataaccagatcaatgtcggctcctgcttcccgcagatactttttggccctgtacagagcataaatcgtgggaacactggcagaatcccgaaccaattttggactggcgcctgtagcccctcctcttccgtcaatggttataaagtcaggtccggcatagacgcagaattccagatccctctcaatccgtcccgcagcgatcttaattcccacaggcctcccgtcagaagccatccgaagctgatctaccagatcctttaaatcttccctggactgtaccatagagaatctggaggggcttatcacatcttttcccagaggcttatttcggatcctggcaatctcgggcgttaccttatcccccgggagatgccctcccattccgggcttggtaccctgcccgattttaatttctattgcatcggcatttcttaggttttcaggatttacactgtagagatttggaacatattcaaatatatatttgtaggctgccgccatttcttccggaagtattccgccctctccgctgcacatagcagtttgtgccatggcgctgcccctggccagggccacctttgtctctttggaaagggcgccgaaggacatatgggatatgtataccggattttctatgaccataggcttttttgcatgctttccgatcacggtggtggtgtttacctctgcatgctcatccagcggcattgggttaagctgagcccccagaatcaggatatcatcccatcctggcattgccattctggttcccatagcctcaatgattggcctgcccgtcaccgccatctcatggatctccttcatatagcggcaggactcatcaacccttgcatattccgccggataatccagatcccgtctctgctctcccggcttaggagcagcctgtaccgcctccccaagcttctcaaagatacctgccggccggctgcatatgggacatgcctccagctccccaattggtttcccctgctcctcttcatcataaatataaccacactgtctgcacttgtactttgccatctcttttcctcccaatacttcctatgtcaggcataggagcaactgtccgcatatacctgtttatatttaagtatagtataagctacaatttattatttgtacaccaggttttatagagtcagttaccggcagggcttctaaagatatccataaaaaaagccaagacaacaatgtcctgacttttctttgtagtagcggggacaggatttgaacctgtgaccttcgggttatgagcccgacgagcttccagactgctccaccccgcgttaatttcttatcactcccctattatagtcctatctatattctttgtcaagcatagggaggaattctgctgtatctgtttctattatatgaataaatttgtaaattatacctatttattcattttctatcctggccttcggctgtgggagccctatttaggactcccacggaatgaagaaccggccggctttaactgtccggcttccagtgttctctttccttccattttaatctcatcttcctccaccaggatttgacccactccatggcgccatatatgccgtctatcaggtaaggagtaaaaatgaggagaagaagcaaaactatcatttcccggaacggtatgtcctctacactaaacagtggcggaagcacaaacaggcagcagaagaacaagccaaacatggcataataaacagcctttctaagcttcgactgcaaaggatacaccttccggatcatatacaggctgaccacacctgtggccagcacacacatggtagagcgcacagccgcacctgacttcaggtatccgcagaggattgtgataagaatcacctccgccacaatggtgagcgctcccgtgagagcattctgcagcacgtttctcaggaagtctcccctcacccggttaaagttgggctccagagccagaataaaggtaggaattcccacaccgcacatactgatgacagaaagctggatgggaataaagggatactgccaggtaaacatcaaggtgaaaatagacagtaccagggaaaagattgtctttaccaggaacagggaggctgcactctgaatattattgatcactctgcgcccctcttttacaatgtaaggcatagaactgaaattagaatccaacagtaccagattggagcagttcttggcggcatcgcttcctgctgccatggcaatgctgcagtctgcctcttttaacgccagaacgtcatttaccccgtcaccggtcattgccacaatgtgtttctgttttttcagggccagcacaatcttcttcttctgttcgggtgtcacacgcccgaatatatgatacttctcaaccgcagcctccagagccgaatcagaatccaaagtggttgcatccacataagaatctgcatctgcaagtcctgccttcttcgcaatattggagaccgtggcgggattgtccccggatatcaccataagccgcacatccctgtccgcaaagtacttcaaggtttctctggcgtcctcccggataatatcacttaaaagtataatggcgcagggaatcatatcctccggcagctcgttttcctcggcaatttcctcgctgtgggccagaaccagcacccggatgcccttcctggtatgctgatcaatctgatatttgagagaatcttcttccttctcctgagggaacatgaattcatatgcccctatcagaaaggtacccttcccctggaaggatgcaccgctgtatttcctggcagaagaaaatggtatagtatgcacggcagtataatccgcacgatccggaaaatattccttcattgccataaaggtggcattgttatccttcaggcagtgaagcatatttcccacaatctcatccaccgggacttcttccagggggatcacatcctccaccttcatccgcccttccgtgagagttcccgtcttatccaggcagagcacatccacccttgccagggtttctatacagaagagttcgtgtaccagggtattatgtttccccagatgaataacgcctacggccagggcgatgctggtcagcagtaccagcccctccgggatcatacccaaaactgcggcaaccatgttcaccacagcatccccaaaggaggcgtgggccaccgcatactggctgtagaacatccctacccccagagggataatcagaatgccaataatcttcaaaatcacatctatagacttctgaagctctgatttatgctttttatatgctctggcctctgacatgatcttataggaaaaattctctgttcccacatggattacctggaccatcgcctgcccggacaccacaaagcttccggaaaacagctggtccccctgccgctttacaatgatatccgactccccgctgataagggattcattgacctccagcatgccctctctcaccgtggcatccgcacagatttgatttcccgcccccagaagcataatgtcgtccagcacgacctcctccacagggatttctttcagcgttccctctcttactaccttgactttagtggcagtaatcagggacagcttgtccagtgtcttcttggcccgtatttcctgaaagattccaatgccggtgttgcagatcacaatccccataaaaagcagattcttaaaagaacccacgaagattacaagtccggccagaataatatttatcaagttaaaaaacgtcatgagattgtctctgacgatctgttttatgcttttactgttcttatcctcctgctcatttagcaggccgtctttttttctctgcctcacctgttccgatgtaagtccccgtctcaggtcgggctgtaacaaggtactgtcttttgtctcttccatagtactcatctgccttttctgaagatttgtccgcactgttttcctgcattttcttcattatacaaccctttttggcatccaacaaggctctggatcagaaaactgcctgcaccaggatcatatacagtaccgtgcctgtggcaatagacagcagcatattcttcttccaacggtggacgcagactacccctgcaattgaaatgatctccggaaggccgtaggacggggaagtccaggatacccctttgaggcagtacacaatcaaaagccctatcacactgtagggcagtaccttgcccagatactgaatatatttgggtatcggcttattatccggaaaaatcataaaaggcagaaagcgggtaagcatagttcccagtactaccattcctatggttatcatctgctgtgttatggacatacgtcaccttctttcttctccagcctccccctcaggatagtcagtatggccagcatagttgccatggacggcaggataaaattgtcaggtccgaacagaaacagacagactgcggtggccaccactccgataaccgcagggaagtgatctctggatgcgaaccattgatccaggaaaatcacaacaaacagagcagtcatcacaaagtccagaccctttgtatcaaagtggaggaagccccccagcactgcccccgcagttgcacctgcaaaccagtaacattgattcaggagagttacaaaaaacataaaccacccccgatcaatgcctgccgggggatctgtggtgcaattaatagaaaaggactcgtcacacatgccaaagattaaataccacttttttctgccagttcccctgtatttttccagcatggatatgccgtaaaacagatgccgggcattcaccatcagcgccagaagcaaagcataaaatggctgaaagggtgaaagcagcagactgactgccacaaactccatagaccccgcaaagatagtggcgctcatcagcatgggataccagaaggcaaaccccttgctccgcataaagattccgtatgcgatcccaagaaacataaagcctgcacagattggtatagtatacggaaatgccgctctaaatgcctttttcttcatactctcattgttctcctcccctagttaaaatagttatctatcccgtcggcaattccctttgccatctttttctggtaacctgcatccgccatcctgcggtcttcggaagcattgctcatgaatcccatctcaacaatggtaacaggcactgtactccaattgataccgctcatctcgtcagaggtaagaatccctctgttcttggcacctgttgctgcgcagaagctgtccaggatattctgggaaagacggcgggaatcgtttacaagtcccctgatatacggattgtttttagacggtgcgatcgtcagggcgccggtcgctgagctgctggagtcgctgtttgcgtgaatccgcaccaagatatccgcaccggcgcgggctgccatcttagccctttccgcgttgctgatatttacattgttcgtctcacgtatcatataaacttcatatcctctggctttaagttcatctcttaatttcaatgatacctgcaggtttaattcatactcgtacagtcccgtggcggttcccttcgcccctccggtaaccttcgcttttgttgccgacgctcccggtcctatgggttccttttcactgtttccttttaactgatgtccggcatctatggcgataagtttccctctcgccttgtccgggatccaggcgccgctcttatccacaaaatagtttcctatccactcgtcagctgccattttcccgctgcttttcagataataccaggtattccccagctggatccaacccgtggccatggccccgttgtccttcagatagtaccaggtgctcccaatcaactgccagccgacggccatagccccgtttcctttcagataataccaggtattccccatcagctgccagcccgtggccatggctccgcttcctttcagataataccaggtgcttccgtccagctgccagcccgtggccatagctccgctgtctttcaggtaataccaggtacttcccttctgcagccagcccgtggccatggctccgtttcctttcaggtaataccaggtatttctctcctgcagccagcccgtggccatggccccgtttcctttcagataataccaggtattcccaatcagctgccagcccgtggccatagctccgctgtctttcagatagtaccaggtgctcccctccttcagccagtctgtggccatacttccgttccctctaagataataccaggaacggccgatccattgccagcccgtggccatggccccgtttccgctcaggtaataccaggtacttccctcctgcagccagccggtcgccatggccccattctccctcaggtaataccactggcctccattcagcagccagcccgtagccataccaccgtcctgattcaggtaataccatctgcttccctcctgaaaccagccggtccttgcccagccgtcttcgtcaaacgcataccatacattgtcaataaacctccagcaggaagccagccttgtaccgtccggcatctcgtaccagcgtcctttctcctcctggtgccacagaccggtctgagggatctgttcctctttcccttctgtctctgtatcctgtctgtccggtgctgtctgatttgccccccagacgcagaacaccgccatgctttgaagaataattgctgctgccaaggccgcaaaatatcgtctgcctgttcgtcttttcttcatatgtattctcctcaccccagggtatatatctccctgtaattgctgaaaagacccaaaagcagagtccggcggtttcccacctgctctccgctcccgggtcttatatcacctgcgtactcagagttcttctctgaaccggatttttgtgtaggctttgatctcctccacgcactcatcccagctcatcttgctgctgtcgaggcacaaatcataattcctcgcatcgttccagtagttccctgtatagtagtaataataatctccaaaatacttattcaccttttcgatatacttttctgcttcccgctcatcaatatcatttttctccatacagcgggccacacagtaatcccatggcgcatggataaacacccgcaccacattgggatactctttcagtacgaagtcggcacagtgtcctaccataacgcaagactgtgactgggccagatccttcatcaccttagcctgataataaaacaggttgtcattggatacaaaatcgtcacttccgggtggaatcaactctcctttgtatacattagtccctcttcttttaaagatgggattacttctcagcttctcatccgcctcattaaagagtctctcatttatcccgctgtcatcggaggccagacggagaatctccctttcgtagcagggaatccccaggttttgggccagcatgtggccgatggtattccctccgcttccatagtgccgggcaatagtaaaaaccagatgttccataagtcccctcctattctccaagatatgcttttttaattgaatcatcttccataagcacagacgcctctgcgtccaggacaatatttcccgtctccagcacataggcacggtccgcgatagacaatgctttttttgcattctgctctaccagcagtacggtagtaccgcctgcgcttacatcctgaatgattttaaatatctcatttacaaagattggggaaagacccatggacggttcatccatgagaataatcttgggatgagacattaaggccctgcccatagccagcatctgctgttctccgccgcttaaggtacctgccagctgattctttctctcctccagccggggaaaacgctgatacacctcacggatactctcatttatctcatttttatcttttcttgtataagcccccattatcaggttctcatatactgtcaaatcagcaaatacccggcgtccctccggtacatgagccatacccagggtcacaatcttgtgtgcaggagtcttggtgatttcttttccttcgaactctattttgcctgatttgggactgattagtcctgttacggtctggagtatcgtagtctttcctgcgccgtttgctccgatcagggcaataatttccccttcgtttacctcgaaagagactcccttaattgcctggattacgccgtaatttactatcaggtctgttacttttaacattgccattggtctactcctcctattctcccagataagctgtgataactctgggatcgttcagtacttcttccggggttccattggcaagctccgtgccaaaattcagcacatacaaatattcacagattcccgccaccagtttcatatcatgttcaatcagaaggatcgtcacctgaaactgcttacggatcagttctatggtttccatcagctccgctgtctcattggggttcatccccgcagcaggttcatctaacagaagaagtttgggattggttgcaagagcacgggcgatctccagctttctctgttttccgtagggaagattggatgccagagtctctgaaaactgttccaggtcgaaaactctcaaaatatctcctgctctctcatccatttccctttcccgtttaaaatacccgggcaaatgcagcatgctctccgccagccgataagtaatctgattgtggagagccacctttacattgtccttaacgctcatcttactgaacagacggatgttctgaaaggtcctggcaataccgctttgacagatctcggcaggcttttttcccacaatcttttccccgttcaggctaatcgtaccgtccgtaggctggtagacgccggtgagaagattaaaagctgttgttttgcctgcgccgtttggtcctatcagccccaccaggctgccctcttctatggtcatattcagattgtctactgctctgagccctccgaaggagatcccgagattctttacttctaataatgccatgcttattctccctccttctgaagtctgcccgcctgacgcatatttcttctgtccatgaaagcgcgcttgataggggaattattaaataacatcagggcaatcagcacgatggagtataaaagcatacggtaatccgccgctccccggagcacctccggaagtgctgtgagaattacagcagcaataatggatcccttgatattgcccattccgcccagtactaccattaccagtatctcaatggaagtattatagtcaaaattcaccggctttaatataccgatgttacccgcataaacgacacctgcgacaccggcaaaaaaagctgcaattacaaacgtcataatcttatagcggctcacaggtatccctgccgcttccgccgcaatgtagttgtcacggatagaagtaattgcacgtccgtggcgggatctcacaatattggataccagcagcactacaataactgtcagaataaatacaaaggtaaaattacggtatgtggtgtaaagaggaatcttcgaaagcccctttgccccaccggtaataggtgtcataaagttgatgatagatttgataatctctccaaatcccagtgtcacaatggctagatagtcacctttcagcctgagcaccggcacgcctatgataaggccgaagacggccgcagcgcttcccccgatcaaaagggcgataagaattgccggaagctggggaagttctgtatgtgtcagaaaaagagcaccggaataagcccctacagacataaatcctgcatgccccaggctcagttcccccagaaatcctaccaccagacagagagatactgccatcataacatacacacagataggaataatcagtgatgtcatctgcctgctcagcatacccccgctgataaggccctgaatcacggcatagacaccaaccgctataattacattaattatggtctttttatttatcttcatctgtctcacctacactttctcaatcttcagtttgcccagcaaaccagagggtttcacgagaagcacgatgaccagaatgccgaatacaattgcatctgccagctgtgtggatatgtatgccttagaaagagactctataattccaaggatgattcctcccagcatggcaccgggaatactgccgattccccccagcactgccgcaacaaaagctttgattccaggcaatgcccccatagtggggagcagggtctcatactgtgatatgaataagatacccgctactgcagccagtgcagacccgatggcaaatgtaagggaaatggtctgatttacatttactcccatcagctctgccgctcccttatcctccgatacggccctcatagcacgtccagcttttgacttattgataaacaaagtcagagcaatcatagaaactgtcgtcacaaccagagtcacaatcgtgattcctgagatattcagactccccaccttcacagacggaaccctgatgatagaaccaaaaggaatgggggttgccttaaaaatgagcagtgacaggttctgcagaagataactgacaccaatcgccgttatcagcaccgccagaggggttgcgtttcgcagaggcttataagccaccttttcaatggtaattccgaggactgcgcataccacaatggtgagcagaaccgcaggcaccggatgaagtcccaggagccctacaaacacatacagggcgtaagctcctaccataataatgtctccatgggcaaagtttatcatcttcgcgataccgtacaccatggtgtatcccagagcgatcagcgcatagatacttcctgtccgcaatccattaatcagctgttccaggatactgtttaccaaatccatactttctccaccttctttcgtaatatttaaatcctgcatatctttggagccgtaaaaggagacagctgttgccatctccttttgctatcatcctatagattacagatttactactctgctttgtactgatatgctccgtcttttacttctacaaacttaacttcctttacagcagcacctgaggcgtcaaaagtaatctcatcgcctgtcattccgctgacagtaatctttgtcatagcttcaatcatatctgcactctcaatgcttccagcctcttccatggctgctttgaatgtgtatacagtatcgtaagcatctgcagcaaactggtcaggagttgctttataggcttcattataagcatccacaaactttttcacatctgcatcatcaaccgttgcacagaatgggctggagaatacacatccctctactgtggaagcatcagatactgtatcaagaacgccgtcccatccgtcagaacctaagaactgcagtgtcatccccatatccttcgcctgttttgtaatgtaagtagcatcctgatagtaagcaggtacgtagatggcttccgcatccgtacctttgattgtggtcagctgtgtattaaattcaacatcattggtgttgaatgcttcactggctacaatctctccgccttttgcttttacttcttcttcaaaagctttctgaagacctgtactgtattcatctgctgcgttatagataacggcaatctttttcagtcccatagtatcaatcgcgtaatctgccattgccttgccctgctccggatctgagaagcagatgcggaaagcattgtcattggcaatacagccctctgcagaaccggatggggttacctgcagaataccatcctggtatgtctgatctacaatagctatacaggcaccgctggttacacaccccataattgcattggctcccttgtccataaccgtgttatacgcctgaaccgctttatcttccgaagcctcatcatctgcaaattccagcgcgaatttgtaagtagtgtctcccactttcactccgccggcatcattaatttctttaatcgcaatctcagctccctgcttaacgctggttccgtaagaagcagcagctccagttacagggccgatgcctccgattaagaaggtctcttctcctgcgcctgccgcctcagatccttctgctttgtctttcttgtcatcaccacaaccggccatcatagacacagccaatactgcagccacggaaaaagctgcaattcttttcatgtttttcatctcatatcctccttcaatatcacgctttcagatcgactttatagggataatctataaaatctttcttaaaattctgattactatcataccccaatcaggacatatctgtcaatggtttcctgctttatccagacagcaatttgaaggattgatgcgctgaagcatgtaagtatcttttatacttcgcagtaccctgcaatctcatattccccgggtatctcgtaagtcttatccggcgctcccatgacccactgaacctctcttggcctccactgggagagaactgccgagaagtgaaacattacaattccctggttcagctttccgtcatgttctcctgtaagctcatcctctttcactgccagaatcatttgattatagtcatagataaaacggtagggctgccggttcagaaaggacggcgcaatactggccccatagaaggctttctccatagtatcgtcgatcacatcctcttcccagcctgatttctgcccccatttttccagatataccagatcctccacgcagattttaggagccaggtgcccttctcttgtgatgacatgtatatcagaaggactcttaatatccagacgtgttctgtcccccagagagttcccgtatccaaacgcaataatagccgcgacatttttatcagaagaaagtcccacagcctccttaacagcgtcactgtcagtcagtgtcacccagcagctgtccagctccatctccgacagcttcaaaaccaaatcttcccctatgtaccctgcattctgagccgcatatggatgatcctcggataagattaagagataatacggtgccttaatcaaaaagcccttatatcccgcaactccatccagaagcttctccccctccttctgcagcagcacaaggtccacgtcaatgtggggaatcagtctggaacccttctgaaaatgttcccggatatcttccatctgcttctcagacaaatcccagtccttaaaatctctgattgacattctcttttccattaaattgtagtaatccatggttaacctcctgtgattatatatttgctaactttaccctttaactccatattgttatcttaatgcagcgctgtaggattgtcaattcacatacgccctctgcctggaatccaggattccaagctccgccctgtatttcgccaccgtcctcctggaaatatccgtcccctccgccttcagaatctccgcgatcttggaatcactgagggtctcttcacttttttcctttccaatgagctgtgcgatccggtttttcaccccatccgcagacatttccccggttccctctttcgtccccacagccccggtaaataaatccttcataagaactacattcctatactgaagatacttgccctttacagctctgctcaccgtagacacatgcatatctacctttttggccacttctgacatactcatcggctgaagctgcccgcggttctcaaagtaatccttctgcagttccaaaatcgcctctacaatgcggatgatggtactccgtctctgctccacgcagttcacaatgaacctggcccgttccagtttctccttaaaataagctgccagttccggatcttctgcctcccgcatcatacgtatataataatcattatacctgtattcccccatccagccgtcgttcagctgaatctcccactggttatgctggcgggtaataattacatccgggatgatatattccggtgactctctctggacattcatcaaaggccggggattcagccctcctatgacatgaatgtattttttcacttcggcagtggtcagttttagtttcctggacacttccccaatgtgccctttcataatctccggcatataatccctgatgatggcagacagatttccgtcgtccaatccctccgcctctatctgcttcagaaggcactcaccgatgtccctggaaaatacccctgcaggttccagattttttaattccctgagacatgctttcactgactctatgccgaatcctgaagcgtcagctatctcctgaggttcatatggaaaaaacccgtcctcatccagacattctgtgagatactgtatgagcttccactctcctgctgtatacttctttttgtccatctgcataagcagcatactttttaattcgtctgccggttttgctgctatatcattcttccgctgaatctcttcctcttcccattccatatagtgatccttataggatatccctttttcatagagctgttccacattggtcagcatctcttcctctttgttggatacacaatccagaatcgggttctccagatattcattggtaaggaattcatccagctcctggttcgtataggccaggatattcagcgattgtacctgatttgctgacagagtctggctttgtaccacttctaacttattgcccaatttcatatgtattaccttctcttagaatcttctgccctttctgctataattttacataattcgattatatccaattccagtcctttcgtccagcacagtgtatatataatttgcaaaagtagatttgcttccataaatatgataaaatcatagcgacaaacaaacttagggagggatctggaataatgaagaatattcttgtgatacagggcggcggcagaaaaaatggaaatacagcacagcttatcgctcattttgtaaaaggagcagaagaaagcggccattctattgaagtaatatctctggcagaaaatgaggtaaaaggctgtctcggctgtaatgcctgccgctatggaaagccatgcattcaaaaagatgcatttaatcttattgtgcctgccataaaggctgcagattgcatagtatttgcatcaccgctctatttctggacggtgtcttccaaaataaaggcatttatcgaaagattttattgtatagcacaagaggatccaaatcctccgttaggcagatatgaaaaatatccaattaaagattgcgccttactgatgacttcggctgataatttcttttggacctttgagcaggctgtttcctattataaatttgcacttattaattatattggatttcaagataaaggaatgctgcttgcgggcggctgcggggataccaatgggaagccgcaaatcgctcaaacaaatcatctgcaggaagcatatgaattcggaaagcatatttattaattacaagaaagattgcgcgaaagcgcaatctccgcctgcggcgggctgtcgcaggcagcatcttcctttccgccgcagtgtgagcccccggagggttttttattacatagggaacgaagtttcctatgtaataaaaaagcctgctctcagcacaagagcagacattttatattacgatttccttcatttctctgtatttttttggagtgatgccaaaagacagcttaaactcccgggcaaaataattgggatcttcgtatcccacctgatacccgattccgctgatgtaatcatctgtctccagaagaagccgggcagccataatcattcggatttcccgcagatactgtttgggggatttccccagctgatctttaaatagctgacggaaccgtgatttgcttaatcttgcaatctccgccatactttccagtgtatacctctcggaagggtggacggcgatatagtctagtaccaaccgaattctggtatccacattctcatagttctttatcaggccctcattgatattagcggcaatcctgccaatgtctctgtccgcaggccagtccgggttgtgagagcacaaactggcaatcagcagattcatataaccttttatgaaaaaaatgtttgtatgagattttttattactccaattatagatgtgtgaaaaatacagtttttcattctcactgtctgtcaccctggggatcccaaagtaatcttccagcacgtcgcccccttcatagtacacagaagtcataaaacggatatctatgatagaaaatttgctgctggccgcactgtagctgaatccgcatcctctgggtatatatacaatctgatctttatagacttttactttttccttatttatgcgaagctccgcctctccatcctcaacataccagaacatgctgtagggtatcatacgccgggaaccaatccactccctgctgaatacaaacttatgaatggacaaaaagtaaaaccttatattgtcaattgtattcattttttacggctcctctccatccttatgaaaaggattatatcaaattacgccacaattgtagagattatagccgcaatttcgtcactttatgctattttttgacacctcttctctattttatttataaaccttcctttataatatacatatgcccctatccgtgggataactatatgcttttgcaggctgcactcctcaccagaaagtcctatatgctttcaatcctttagcctgtcagcaggttattgctgcggataaaaagacactgccggatgtgctccggcagtgtctttttctacttttcttttatattcggcagcaatcggttatccggagataactttagaaagggagcatatgccacttcccagggatacccgtcaggatccagaaaataccctgaatacccctcatatcccccccagtccttccactgaggtacctggtggctttttccgcctgcttctacggcccggttaaacaatgcatcaacttcctccgggctggcgccgttgagcgccagtgtaaatccgtggtactcctgcttggggctcacaggaagaagggcgtcattggccagaaagtcatagggcacaaggcctatggcaatgttgcttgtaaccataaaggtacacatcccgggatccgaatccggggataattcccatccaagggcctcataaaactttactgagcgatccacgtcctctacccccagagtaataatagaaatgctctgtgctttatagctgtctgcttttcccaatctctccttacctcctcagcattgttctgcaaattttcttatcatttccttcatagcaggaatatcttcatgaagctttaggatggtgcttcccacgaatgccgcgtcccctccggcttctttcaccatacgcacatcctccggtgcatgcacgcccactccgcagtagatggggcgttcgattccgcaagcgcgcagatgggcaatacaagcttttagatccgggtactgaggattcacctctttggttggcttagcctgcatgtagacgaagccattggactgctttgccatctcgatttcctcaggcagcatctggtactgtacgtagcatgacactctcagaccggcggcaatgatctggtctttgatccgattgtccttcaggcctaccagaagaatatctttaaaatcattctccaggcagaagctgataaatctttccgtgccaatctcttccacggtattctcataggccagaaccagcagtttaatatccggaagtctttttttcacggccaccatactctccatatatttgtcgtaatcatcacaggcttccagcgcctttgccattcttcctgcaatatattctccttccaggtatggatccctggagggaaagtcaatttctatcattgtacaccctgcatcggcgtattcgattgccatctcatagctgctctcaattgtgggatagccgttggataaataacatatgatttccatgatttattctcctttatatgctttctggaataatgctttaaactgatccaactccggtatgacgggattggtttttgtacagccgtcagctttcgctgcctttgccatttcctctaaaagctcattatatttttcttcttctttaataatctcctgaaaagatgccggaatatgtaattttccgttcagttcccggatcatcgctgccagatcctctccccctgccttctcagccagggaacgataaatgcccgctgccctctcatcctgactgttaaactctataatgtagggaagaagcatggcgtcccccagaccgtgaggtacgtggaaatatcctcccagcgtatgggccatagaatgaacgattcctagagatacatttgtaaaggcaagaccggcagccatagaagcattcagcatcttttctcttatctccagatctcccccgtttgcatatgcctggggcagatactccataatatccagggctgcctgaagggccaaagtgtcgccaatatagtttgcccttgtagaaaccagtgcctctatagcatgtgtcagggcgtccattcctgtctctgcggtaatgcgggcaggcattgacagggttacctccgggtcacagatagcaatgtcaggcatcatctccatattgccaatgccgtgcttcattcctgtctctgtgtcagagattaccactgaccgggatacttcgctggcggttcccgctgtggatggaatgcagcagaagtgtgctttctctctcagctttggaaacggtacggcctgtaatacatcctccagtgtctccagctccggatgttcatagtagatccacattgtcttgccggcgtccatgacagagcctccgcccagagcaacaatcaagtcaggccggaacgcaagcatctcctttgccccccgctttacagtggcaaaggagggatccggctccacaccctcgatcactgcaacctctgcgccgctgctcttaaacatatcccttactttatccagcataccgctttttaccatgctggatcctcccagaacaattactactcttttatactccagagattttatgtgttccaggcagccctttccaaataacagctggctgcctgccagtttcataggtctcatcataattttttgcctcctctttattcttccattccctgcataacttcacggaccagttcatagtcaatgggattcgtcagaattccgtcctttttcaggctggatcctatgataccgccgtctgccacatgcatctgctccccgatattcgaagcctttacgccgctccctgcaaatacaggaagatgcactactttttttactcttgctatcatatcaattggggtttccacgccaatctcacttcccgtcacaatgataccgtccgctccgtttgcctctgcctcccttgcagactgttccactgtaatatggggaagaagcatatgggcgtgttttacctgtacgtcagcgagaatccttacgtgctccagacccagctgctttctgtactccacacattctctggcgcagggtgcgatcactccgtcggtgaacaatacggtatccacaaataccgggacgcggataaactgtgcccctgtaatccccgcaatggccagggaagccttgcagtcgttaaatgccgcatcgatccccacaggaatgcggattgcgtcctttaccgcagcagcagcagcggacagcgcggccacctgggcggtattcagcatagctttaaaaggggtatctcccatattttctacaatcacagcgtctactccggctttttccagggtaacggcatcctccactgcacggcggatgatcccctggtagtccccgtcaaaccccggggtcccgggcaggggaagacagtgtaccatgccgataattgtctttgcctctgttgtaaataatcctgctttattcataattacagcctcccgtccttatttctttcatcgtaccggtagattccctccagtacggtgcggcaaagaagatcctctgcgtcctttcttgcctgcccctgaagagtttctttcagattttccagtacagtagtcatagtcacaatacaggttttgactcccattaatcttcccagtgtcaataagcaggaggattccatatcaatccctgtaacctttaatttgcggagttcttcaaaggtacctgccatatcccggccccactcctttgagaacctggaatcgtgcatctgactgtaaaacccgtccatagtgcagttaattccattgacatactccgctcccattaggtttacagtctcattcataacattcaccagatctacgtctgccactgcgggataagattcttccacataggataaactggtcccctccctgcgcatggctgctatgggaatgataaattttcccaggagatcatcctgaagccccatgactgttcccattcgcaccgcaacctccatgcctgcctcatacatttcctcaagggcgatggccgctgaaggggcaccgattccggtagaggtaacggttacctccactcctttgtatgtacctgtataggtattgaactctctctgaaaggcaaccttcctgggattgtccagatactgctttaaaacctccacccgccagggatcccctgaaaaaaggacgtacctggccacagtggatgcatccactcctaaatataatgtgctcatattttctctcctcacttcccgctttctttcagcagctgtctgtatttttccagcagcgcttcctctgtgggcatgtttgtacagcagccctctgcctgaagaacaaaccaggagagtacactgcccagcctgcagcattctgccggctccatgcctttgagatagccatagagaaagcccgcgatataggcatcccctgaacctgttgcatctgcaatctcatcggctctgcagatcccgatttgatgttttaccactccctgaggggtgcgctgatagcagatgcttccctcttttccaagggtagtcacgataatctcagcacttcccagagaaaagagctctgtgatatcccccaacccatagatctgctcgatgatcccccgctccacttcattggtaaaaattattttgctcccggtgagcagaaccttcagaaactcctggggaaaagcatcaaaatcatctttcattccaaagacaacaggtacctgatgacggacacactgccggtagaactcttcattgtctgcccttgaggcaacggtaatcacacccagacgtgtattctgaaataattcatcttccagtggctgtgcgtatttctcatccatagctcccggataaaaaatagttatgtgatcgttttgattgtcctgaagcagatagcacacggaagtagcttcctcctcaatgacccggatgccctctgtggaaaccccgccctgttccagaaatgccttaaatccgttttctatataatctcctccgaccctcagaacaggaaggccgttgaggcccagccggctgaggccgtaagcaatattgacggaacatcccccgtaaaagatatctacgttattccggttggtgaccagggaagtatatccaactttagccggcgaggcaatctttatgatatggtccatgcttacatatccgctggttaatacatcaatctgtctcatgctcttccccctttataatttcccgctgtccagcagaccaaataattcttctgtgtccactacagtccccagatacttgctgatatcctccagatgcacctggtttactgtctcagagttggtggcaacacagtctgaaaccacatagccgtcatagtccagataaaaggcatctgtgatggttgcccggatacagcagtttgtctttgtacctacaacgataacattttttaccccgttctctcttaataccaggtccagatccgttccgaagaatccgctgtatctcctttttttgattacgtaatctgtctcctcctgaaccggaagcatagggtcaatctcttctcccccgctgccctctatgcagttcgggcgcatggaagcagccttccggtcgaatttcccttttctgttgcagtgctgcagaaagactacaagcacatccttttctctgcatttatccagaacccttttaatcctgggcagaatctcccggttctgagggtagaaaaccagtccctcgggatccgtaaaatcttttaccatatctacaataagcagcgctgtcttatacataccttatcctttccttcaagcatctaatggaatcctctgactttttggtttctgtatttgagcattgacactatagtcagcacaattcccataaccacgtagggaatcacatcaaacagagcggcagccggaccggcgtaaagccccatattaaccgccagagctctggccgcgccgaatacaatggcataaagggcgctggacaccggatctccctggccgcagtagattgcggcgatagcaataaagccccggcctgcggtcatattatttgtaaaaagtaccatacgctccagcgccagattgatcccggccagagaacagcaaaatgctcccagaagaattgccaggtagcggtacttattggtattcagccccagattcctggccgcatcttcattttcccccactacccggacatatatgccaaattttgtacggtacatcaaaagccagataaagaaaatgcctatgaaggacagatacgtaataggcgtgtgaccgcttaggatgtctccgagaatgggtatcttatcgatcaccgggatctgtattttaaaatcagatacattcttccaggtaagacggatattagccgactccatatactggagcacaaaacccgctatggccggaaccaccatattgatagccagacccaccactataacattacctttgtacgtaaccgtcataaaggagaaaatcaggccgataaggaggcagactgcaattgccgcaatatatcccagggcaatatttcctgtgagataggagaccagcatggatacaaatgcccctgccagcatcataccttccagcgcaatattcagaacattggctttataggcaaagatgcctcccagcacacacagcaatataggtgtggcatggtatacggaatcatataaaatatttcctaagaagttcattctgtcaccctcctgctctctctccacattttatagcgttcggtaaacccgtatttttcattaaagaaccgtactgcaaggaaaagtatgatcaatccctggaggacacccacaatttccttgggcacagacgtatacatattaatattatccgcccctgtcttcagtccgctgtagaatactgcggccagcagaatcccccccggggtatgacgtcccagcagcgcaatgagcataccgtcccatccaagtccagtggtcccggagaaggtcagtgtatacttaaacgcctcgctcatcatctgtccggatccggccagtcctgccaaagcgccgctgatacacataaggacaatgatctttctgcgcaccctcataccggtggcctcagagaattccgggtttttaccgattgccgttacttcatatccaagctttgtctttctcatcacaaaggccattagaatcagaactccaagagctatgaaaaagaacaatgtcagctttgagttccccagtctggaaaacatagccgtttcctttatggtaggcgtacagacatatccggatccgtcctctctgaaaggtcctgaggacaggtactccagaatctttatcatggcatagttcaatgtcagggtaacgaccatctcgtccacatgataaaatgccttcaggagcgccggaaccagagcaaataagacaccgaacagcattccaaccgccatacagatgattttgtgaagcaccgggctcccaatctgcagggaggcacccacaaggcctgagaaaaaaccgcccagcagcagctgtccctccacgcccatattgaaaatattggccttaaaggtaatggctatggcaagacccgtcagcagcagcggagaggcatagtgaagggtgttagaaagtcctttggcagtaaacagggattttcccagcatgatccggtatacggtcagagggttttcccctatggctgcaatgataatggcgccgatcagaaaggccagcagtaccggcagcaatgtattcactattttaggaaaaatattgaattttttttctgattttttcatgctgttctctccttggcttttgctccggccattaaaaggccgatttcttctacaggtacactgggatccgcctcaccgatgattgcccccttatacataacggcaattctgtcagacagactcataatctccgtcagctcactggagatgagcagtacggaatatccctcatttctgaatttcagcagctgcttgtgaataaactcaatggacccgatatccactcccctggtaggctggcacgcaatcataacctttggatgattctccagttctctggcaataattactttctgggcattccccccggaaagctgagagatctctccctccggatccgcaacacggatatcgtatttttctatgtaagagtctgcgagccttcgtatggttctgccatgcagcaccccggacttgcacacctcatgatttccaaaataaccggcaatgcagttttcaggtattgtcatatccctgcacagcccctgggcataacggtcctccgggataatgccgagacctttttttctaagctcatccggccaggcgttggtaacatcacagccgcacagggtaaccttcccctttgttacagtcatcagtccggtgaggaccttgatcagttcactttgcccgttgccttccactcctgcgattccaagaatctcacctttgtgtacttccagggagatatcatggagaatctctttttgttctccgttcacagtacatacatcttttacacaataggccacctcgcagccgcatggggttccgttctcattgctcacggtgagaacaacatccctgcccaccatcatctgtgccagttcctgttcactggtatcacaggtagccacatttccgattaccttcccctgtttaattacggttacactgtcactgagttccataacttctcttaatttatgtgtaattactataattgtcttcccattatttcgcagctctttcagattgtccatcaggcgatccacctcctgaggcgtaagcactgcggtgggctcgtccaggatcagaatccggacattccggtacagcattttaaggatttccacctgctggcacaggcctacggagatattctctaccttctccagaggatcaatttgaaagtggtactgttctatcagctccctcactctttgaatctctgcgtcccggtcaataaaagggctcttttttcccttccaggtcttattaatctcgctccccagaagtatattctcgtacacggtaagactgggaaccagcttaaagtgctgatgaaccataccaatcccatgcctgattgcgtcagtggggcttttgaatacaacttcttttccctcgattaaaatcttgccgctgcttggacgcagagcaccgtacagcatgttcataagggtagactttcctgcgccgttttcccccacaatacacttgatctcctggggctctaccgatatattgattttatcatttgccacaaaggcatcgaacttctttgttagatcaaccgtttgtatgatactcatgaatctgctccttttcagacaggggccttattccaaaggcccctcttcttccgctgttcctactctgttttaatggtgacatgggggcaggttgcgggatcgaattcttctccgatttgtttattaacaacatcaatggatccatcctgaatctgcttgctgatttcatccgttttagcttttatctcatcccatacagcagaatctgccacatgcttactcatctctgccaaatctgtaataccggtcgcgccggacgcaagattgtagctctgttccttttccatctcattgatctttccgtctgcaaatgcctgcgtaatcgtttttacgggcactccggtgatcttcagtacactggttaatacatgtcctggctgctgatcgtccagattcgcatctgtctggatggctatcttgccaacttccttcgctttggaagtgattccatcccctaccacaccggcatctgcgaaaaccacattggccccgctttcatagaaggtacctgctacagtgctgcccagtgcgggatctgtaaatccagcatcatattttgcataataatcatagtttacattcagttcttctgctgccttgttgattccctggataaatccgtaggaataaaccagaataccgttggagttggttcccccgatgaatccgattcctctggactgatctaacggagttaaggaatatccttcagggaacagtttatccatattttcattcatatacacagacaggtatcctgccaggtaggatgcttcgtgcacatcgaacagtacagagattacgttatcatggattgtttcccctttatcgtctctgttgggattatcgttaaatactacaaaccaagtgtccggatactgctctgcgatgggctttgctcccccaacgcctttgattaaagcgtcaaaatcatactccaggctaaagataagattatagccatcctctgccagagtttccagagctgccggaactccatttaccggttccacaatcttacactctgctcccagttcctttgcaatctcttttccctccgtgcaggctgactgattatacccattgtcgttctgtccggagttagagcatacgatagccatcttaacgtcgctgccccctgctgccgcttccttgccgtcttccttcccggaatcacctccacagcctgcaagcatacccacagccatcacagctgccagtaatcctcctaaaaatttctttgttccttttttcatcctttcttcctcctttattttatctggttaatagaaaacttaaacttatctgtcctgtagtagcacttaaagtactctatggggacctccatcccatttacaataccactggttgtacatccaaagagtataatcggcatcccctcctcaatatccagatattccgcaatctcgtccttggcaagaactgcttctatggttcttctggccttggttatgcgtatcccgtactggcggggaatgacatgatacagagattcattcacaaaatcatattgatcaatgccggagaatatcttttccggaagataagtgaccgtataattcagcggttctccctgtgcatacaggattctgcccatacggaaaacccggtcatccgtagtaatgtggagcgtttttgccctcttgctgtccgcaggtatgtattctgccgtcattaaccgcttggagggctgaagccccagccgcagaacgtcttccgtacagctggtaatggcaaacaggtcctggctgttctcatcggattttacataagtaccttttccctgaaccttatataaatatccttccttcaccagttcatcaatggccttgcgcacggtaattctgcttacctggtagttctccatcatttccctctcactgggtatgggcaagtctcctgcatattcttccatttcaatcttttgaataatgtctctctttagtgagaaatacttgggtatgtgttcttcctccatcttcaccctgcctttttcttgtattgttcagctcatcatattatgtcgttatgtcgtcatgaccacttgtgcttttatattactcctttatccgtttttgtcaatagattaccctcatcttttagttttttggtgattttctacaattttaaccagagattttctacacgaaaaatttcaacttttttatatcacagcaggataccagtacgtttcggggaaaaacagaaccagtttcccaaggccccgcctttggaaaactggttctgtctgtttcttattttcacattaactattattttctgatgctatctgatcaatataaaatttatatttgtccgtccggtagtagcagtgaaaacgttccaccggaaactcctccccgtctatcattccgtaagtagtgcatccaaactttatgagaggcatccccactccaatgtccagatactctgcaatctcatctgtggccagaacagcctccagagttcttcttgccttagtaagtgtacagccgtactcgttgttcaatgtctcatacagggactctgccgcaaaatcatgccggtcaattctggggaaaagtttatacggcagattggtcaccgtataattcaatggctccccgctggcatacaagactctgccaaggcggaaaacctcctccccagggagcagccccagcgctttggccttgcttctgtctgcaggcacaatctgagatacaatcactcttttcgtaggggtcatccccatcttcctgacatcctccgtacaactggtaatggcaaataagtcatggctgttttcatccgtctttacataggtgccttttccctgtaccttatacagatatccctccatgaccagttcatccacggccttgcggatggtgatcctgctcacctgatagtaatccataagtatccgctcgctgggtatggtctcccccgcagtatactcctcagtctcaattttcctgataatatctttttttatgacataatacttgggtgctttttcttccatcctcttatccctctcacatttttgcaaatgctctgggcaggttctcacgctggcgcagaacctgcttataaatacaatagtatcatatttgcatgcaaaacaaaagtaaaaatcacccgttcctccagggctcatgcgatcggccggctgcccacgggaaaatacagtattgtattgcttttgaagatctgattagatataatatgatcaagattaacatatgacaaatttccatcaaatacatttatggttgacaaaggagaacttttatggaaggataccgggacgcttttatagacacccttggcattagtgccagcaaatatagattggataaggaattcaccctcctttgtgcaaatcaatatttttacgaaagtatgggatatacagaatctgaataccagacactttttccaagtctctctcaatactatcaaaaacacatcaaagaatttcttaaaatcagagacaccgcttatgctgcctttcaaaatggagataagacttttaccctggactgccggacacctcagaagggcaatggctgcagatgggttcgcatgacgggaaccatcactcaggagcaatccggcgattgtcctgtccttctggctgtatatacagacatccatgacatcatttcggcacgggacgagaaatcccggtattttgaatggatgatggatgaatatgtaggaaatgtctatatctgtgacatggaaacctacgagcttctttttgtaaataccgttgcatgtgagacacttcagtcacacagagaatccatagtggggcggaaatgctacgaagtgattcagggacggacctccccctgtcccttttgtaccaatgacaagctgcgggaagatgaattttaccaatgggaatttaataaccctgtgctgaaacggacctttatgattaaaaatcgtattgtaaactggaaggggcgcaaagcccgcatagagttgtctcatgatatgtacagcacggaatacaaacttgccaagaaggacagggagagggaatcccttctcaggaccatccccggcggttttgtgcggattgacgccagagactgccagaccatcctctggtacggagccgagtttctgcaggtcatcggctatacgaaagaacagctggaaaaagaacttcactttcagtgtacctatattcatccagaggataagagtcgtgttacagcggttatgcagaagattcgggaaacaggggaaagcgcagttatagaagccagagtgatctctcacagcggagagctcaaaattctgaccatgaccttatgctacataagcggagagaacagctgggatggaattccctcctattaccgtgtggggattgatgtaacccaggaacggaaagaacaggagcgccagcgcctggctctggaggatgcctaccggacggcgcaggtggccagttctgcaaaaacaaatttcctgtcctcaatgtctcatgatatccgtacccctatgaacgccattatgggaatggccgctattgcccaggttaatctagactcaccggaaaaggtccatgactgcctgaataaaattaatgtctccagccgccatctgctcagtcttattaacgaagtgttagatatgtccaaaatagagagcggaaaaattgatcttatgccggaagaggtaaatctgcctgagcttacacagaatgtagccgatatgtgcaaaccgctgattgcagaaaagcagctggaattccagattagtgtgggacaggtccgccacgagaaaatcgtagcggacggtgaccgtctgcatcaggtctttatgaaccttttgtccaatgccattaaatatacccccaacggaggaaagatcagtctgttcatcaacgaacttccctctctgaatcccgagaaagcccggtttgagtttgttatacaggataatggaattggtatgaacagcgactatattcctcatatcttcgagcctttctccagggcagaggatccccgcatcagcaagattcagggaactgggctcggtatggccatcacagagaatattgtgaggatgatgaacggttctatcgatgtcaagagccggccgggagaaggctcacagtttactgtttctgttcagtttgagtggatcagtgaggaagaggtctgtgaaaaagaattggaaggtctccctgtactggtagtagacgacgacaaaatcgtctgtgagaacgccacagcacttctgaatgaactgggaatgcgcggattttgggtattatcaggtcttgaagctgtggaatgcgtggcctttgcccatagccggaaggatgatttctttgctgttatcctggattggcagatgccggagatggatgggctggaaaccctgaaagccatccgggaacagcttggagagcatgtgccaatcataatcatttccgcctatgactactccgacattgaagatgagtttgtccgtgcaggggcggatgcgtttattaccaagcctctctttaagtccaaaatgctccatgttctgcagctgttcctctccaccagccgtcaggatgcccttgatgatccggcagagaataaacatcccggtctcccgggaaagcatattcttcttgccgaggataatgatttgaatcgtgagattgccgctgagctgcttgagatgcagggcatcacagtggatgccgtagaaaacggccgccatgcggtagaggcctttcaggcctcccttcccggttactacgacgccgtgcttatggatattcagatgcctgagatggatggctatatcgccactgaaaccatccgctccatgaagcggatagacgcacataccattcccattctggccctgactgccaacgcctttgttgctgacgtgggcaaagcgcgcagcgtgggaatgaatgaccatattgcaaaacctattgatgtggaacagctgatgaatgtactgcaaagatggatagggtaaccatggagccttcaacagttattttactacttgtctgagcattgaaaggaagtacatatgtcttactctaacagtcaggaacaaaccatttaccggagtcttgccggacagatccagctgggtttctttgacgatggggagcgcttcccatccgcccaggagatcgcattgggatatggagtctcatattgtccggctcagagagcccttaagcgccttgagacgaatggtcttgttcagctttgccgggggaaaccaactgttgtcctggcaaagccatatcataattatcttagcagtaatgtttttaggagccgtgcagctgccctgggagatctctgcaaaggcattcatctgatttccccatctatctgtatgcagggtatttatacaacagaggcctttgcttttccccgagaaaccgggcagaagggcagccccactcattacgggaagcttctttacaaaaccttttataaatatcttcaggccctgggcagccgtacggtattaagcctgtactacgatataggattttttgctgaaagttcctttctggacatcctgaataccctctatgggaaggatgatacgaatttgtttttagaaaagactgctgcagtccttctggagtgtgcacagaccgcttcccaaaagactccttcggagatcatccggcagctggaggctataagtacagctttctttgaaaggattgacccatatataagaaatacccacaccctcagtgaggaaaaagagccttttgactggaaacctcataaaggaagaacccgctactgtgatatcgtggcaattgaactgatctgtaaaatcaatcagggacaataccctatcggaaccttacttcccaacggagcagttttggcagatatttatcatgtgtcagccatcacgatccgccgcactatgcaattgcttaatcagctgggagtagtaaaaaccatcaatggaatgggcacccgcgttacttgctcaggagactccagtatcccctataagctaaaggctctgacttttgatgataatctgagagactttctagaagcccttcagttcctggctgtcacaggtgaatctgtaataaagttcacctttcccaatttcacagaagaataccttatgtccatccagcaggcattgtccatccctcaggaaaaaaaatctatggtttcagttatcagtgcatgtatgcaggctgtagtccactgctgtccgcttgcctgtattcaggaaatataccgtcagattaccattttactgctgaaaggaagtgtactgcggctggatgagacaggagcggaaactgttcctgggtggaaaagcttatccctgtcaatgcttcgcagcctcagtgacaaagataccacacagtttgcacgaagctggagggatttaatggacaataattttatcacaaccaagaaaactcttttggaaattggagtctcggggattgacgggattatccagcctgtacgttcataaaactttttccgctaaattcatcacccactcgctttgcccctttgtgttcagaatataagaggtaaaatacgtattgtctgtgataatcccgcttacctgcagtttcatcatccttttcatgcttttctcgtcgtttattgtccatgcatagacttctttgttcagaacagaggcctgtgcaagaagctgcggcgtaataaaagtttcctcaatactaaatgcatctgcagcgttgagttctgtcatatctccataggctaacgctgcaatatacaccgtttttagatgggggtccagctccttcacacgttcaaggatggaataatccatagatgcaactgtgcactgggattcaaaatgatatctgcggattaactccacggttctctcttccaatttctgttcatgcccgctgctcttcagctctatcatcagatttatcttaccatgggcttcttttaacatatcctccagtgtgggaagatattctccttcaaatccctgcattaaatgctttcctatatcgtacctcttgccctcctcataggttacatcccaaattttctgtgatacccccgcaatccgcttaaagtctgtatcatgcattaccacaagtacgccgtccttcgtttgctggacatcgatctctgctgcatctgccccgcttcggatagcttctttcagagcagccagagtattctccggtgcaaatacagctccggccctgtgtgccacaatttgtatattctcatctctgaatatatcgttttgaaggggatatatcatctctgaatacatggtcacacagataacggaaaccaacacctgcacacatttatagacgttcctcctccaagtgctttttctctttaccctatctatagttctgccctggtacttataataagctgccatgactatactgatcaggaaaacagcccttatagacgcaaagagaatcgtacccacagcagattgtctataataatggaaccagaatgcatactctgcctcccgggggctcacggtaaatttagtccaaagcaaaagtgataaaacatagattgctttactccccaatgccataacatggataaatagaattccgatcagaacaaggaaaaaggttctgattcttttaccttttcccaattttacacttttcatccttgcctctttaaagctgcatggatataacacaaattcgtgaatgctgaaaatccatcggaggaaatagaataacagcagcaaagtgattccgaaataaataacaccaagcaaaggctgtccttttataaactctaaaatgaaaccaggtatcttgagtgaacgcagaggaccggacacaaaaagaatcccggtcaatggcataagaaggagtactacaatactcatacccagattcttcggcataaaaatcgccaatgcccttttgaagctgtgatggagaagccacatgagccctgtcctccttccctccctggcacaatcacagtataaaatgatggctgctatctctaaaaatgaaaaatagataaacagggtgaaaagggccagcagggagattaacgagactggatttttgaatacctccagtatattctggtttgtaagatagcttacacctgccgactccagagcataggtaataatgctctccccaaaatgagccataacagtaagcaaaattttatataatatttcaaataaaagaataacagtccagttccatgatactaatacccatactgttttccataactctgataaccttctccatctgctgctcttcatatcatttcttccttaagtttttatttttcatctgtccctttgtcttctccccgggctaaccgggtgtcacacttaaataattacaataatggtcaggatcccctcctttatagatgcgttcaccgacccctgcatcatttccactagcttttttacgacagccagaccaagtccggtgctatctccctgccgggactggtctcctgtatagaaccgttcaaacagccgctccgtttctatttttttatcttccttaattgtgttttctatccgaaacaacagcttatcattacctagtgtttccagagatactctgagcattcctccggaatattggattgcgtttcccagaagattctgataaattcttcctaacataccaggatccacatttgcaaacacagagacatctgggaacatcacttcaggctgaatgttctttttctcaaagagaggtgcattctctatcaaatattctgcaagcagatttgatacattggtaactgcatactgcggctttaactgctctgtatccagtactgccaactcataaaacgaagcgattaatccattcatgcgccagcatctgcgctgaatgatctctagtctctccttctgttctttggcaagtttagaattttgtagcagttggatatgccccataatcacggtcaggggcgtccgcaggtcatgggagatgctggctatggactccttgagatgctcctcatgctgcagggctcccgcaactgctgaccgctgtttctcaaggttccggttaagacgggctgccagactctccagatcccggtctatgagcgagatatccagcattttttccgtctcatcagacaaccatgccccgatttgatgagataagcttcgaatctcccgctttagtaaataataccgtgtagtaaccacagtaagcagtacacaaagaactattatccctgcaatcatgtctggcacctccaactatttcagctcacactgctgaaaaactttccatgatgcaaaaaaaagcacaatcccccagaccagtggaacaataacgctttccccacagatgaacctgggatctgccactgcatttctaatttggaaaatcggcagaaaacgcaagggcaatccaagcttcattccatatcccaaatacatactcatggaaaatgttaccagagctgtcacgcccagcgctttcgacatactgcggagtactatgcagaaaaacaccggaatcataaagcagatactattgcaaagaaacgagtagaatactgcctttaacacgtggcccgtgaacacccctgcattttccagtccaaagcgtgagaactccctgaggcagccccccagagggaataccagcatcaaaaggttaaatgcacatagatatacccatatctttccagcaaatacagaagaccttgaatggcccgtacatatctccatgttaatggttctccaagtaaactcctgtccaagcatcagagctaaaatgctagaaagcaaaatcagcaaaaacgtagaatcatataccataccatccagaatatcccacagagcagaagaaactccgcttccaggacctaggggctcccgtaaataggtttcccccgtcagaaagcccaggaaaaaaaccccaacaagggtgctccaatagatgggattgtgaaacaactgatatcgctccattttaaacagattattcaaatatattcccccttattttaagtcagaatggacaaaaaagccatatgcccctatacacccgccggcaatccagaggctgtctgtcacaagtgtctgcacataaatgccctccatttgatgtaatgccaaaagcctgagctgccccatgggaagatacctggcaattatctgtgcagagtcgccattcataaaaaatatcatcaaaaagtacagtatcagagggactgtaagcgttctgcctgtatcctgaaaggcaaatcccaaaagtaaaataaggcttcccatagccagaatcatataaagagcaagaaacattgttcttgcagtacctgctgaaccgttcccattgttcccccaaacagctattcccagcagcagatccccaaaaaggggaataaacagaatcacaaggcaggctgcaaaataagaaatactttttgctgccattaccgtacctcttttatgaccagcagtaagataactctgcagtgtgcggttatcaaattctgtcccaataaacattgccccaaaaataataagcagaaaatagagaagcggcatgttatacacaaaagcatctaaaaactcccgggccgtcccaggcagattaccatctaaaatcataagattacccatgaccgccgcaaatgctaacagtccccaaagcattttcgtcctgaacattttatagaattcagccttcagaagatcactcacagggcgtccctcctattttctccagaaaataattctccagggtatctccggaaatctgaagacccgtaacaaggatctgtgcatctgacagaatctttgccacatcctccagctgctccagctgatcatacagctgaatcgtgttatccggcattagcttcatattttgtgtatgaagacgttcctccaggatcaacagggccttttctggctccttcgcgcgaatggaaatatgacgtttgcaccgcagatctaattcctggtgggttatctcctcaataatttttcctttatgaatgagtataaactgcgacgctgtttgatataactcttccagaatgtggctggacaccagaatcgtcattccgtattccctattgagctgcttcagcagtttacggacttccgcaataccagaaggatccaggccgttgataggttcgtctaaaattaaaaattccggagtattcataagagccatagcaattccaagacgctggcgcatacctaatgaaaaatttcgcaccggctttttccctgtagaattcagccctaccatacacaggcagtcttctgccacagacttatccggaatccccctctgtaaccgctgcacttccatattttgtgctgcagttaagttggggtataatgccggagtctcaatcatgcatcctatcctcctgcgctgttcctgcagttgggacctcccgcttttcccccacaaagccatgctgccctctgtgggaaatgaaagacctgtaatcaatcgaagaaggcttgtctttcctgccccgttctgaccaataaacccataaatctttcccttctctatctgtaggttgacatggtccaaggccgttgtctgcttataacgcttggtcagattagtagtttttaagataatagtgctcatctgtatccactcctttctattctgcttagtttaatagaaaagattaaagaatttcttaaataccaaccgtaatttataaaataaaagtaaagcctaataatttactccttcaatctttatgcaggcggtatccaatgccccataccgtatcaatatattcttgctgtggattcgcagccttaagtttatttctcaaattgctgatatgcacatttaacgtattgtcctcactcaggtattcctctctccatatactttgaaatagattagcttttgaaaagactttattcggattgcacatcaagagctccaaaatgctgtattctttagatgtcaggttgatttcctgtccctggcaatacaccagatgccgctcagcatctagctctaatccctggaatttcaaaagacttaagggcttctcctgaaacctcactctgcggagattgctttctattctggccaaggtttcttctaagtcaaaaggcttcgtgatatagtcatctgcacccattcgaagcagatcgatcttattttgggttgtgcctttagcagaaatgacaatcacaggtacctttgatacagacctaatttcagccagaatctggtctccatttttatacggcagcatgatgtctaagagtatcatagctacctcccctttctttaagtaatccataatttttaatccctgatacagggcaattgtctcatagccattttcattcaaatactcggtaagaagctgactgatttctttatcatcttctacgatcaatatcgtattcatatagtttccgcctttcctatatcctaacggtttacacagtaatatactattgtcccccctcactggggcaactaaggccatacgtacctgattcatagttacctttattttagcataacaaaagaatataaaaaggaaaaattactgttcttcacaccagaaatgctgttagtaatatcctgtattgtatgctattataaattaaatggataagatatctccttatcagcaacaaactttgcagaggatggatgagtgatggaattacataaaatcatttacgacttattgttgtcgcagataaaattcggaacctataaatttaaagacccgctgcccaagatggacgacataagccagtggttttccgtttcgctggatacagtaaaagctgcttatcaccagttaaaaaaggaaggctatatcactttgaccaagaaggctggagctgctgtagccattcagtttgaggaagcggagatagatagaaatatccagacgttcttctctccacgtaaagatgcggtcatagacctttgccaatcttttacaccacttttcagtcacgtcctgtggtatggtatgaaaaatgcaggaacggtgcagctggatgaattagagcgcctttgttcacaacagaaaatacttagaccctatatcatagttcaacgcattcatctaatctacggttcactcaaaaatgaccttatgctgcggctaatctggcaagcatttcttttttgtcaagcgccttttatgagcttacctgcaaacatagtggatttaaaagactacaacatccccttgctggatatgataaatctctgccgaaagaaagattgggacgggctttggaaaacagtcacatactctcaagcccacattacatctgcaatccaatggttttatcagtactacatcaccccgtcaaagaacgaagtacccgtttccttccattggaacgcctatcagaactcaccacagcgatgctactttggcttctaatgagccggcgaatgcgattcaactggtgacacagggcatcaaccgaatctccgatgtaatacaatcaaattcagccacagcagaggaaagtgcagctgccagcgaagaattttcagctcaggcacagatgttaaagaatcttgtagacagatttaaaatacttgacacataaacgtaaatataaaattgccaaataataagatcctataaaagttctgccgctgtttttcagcgacagattttttagggactacattttctatattacataaaaaaagccttagaaattttccatttccaggctttaaatagaggcgcagaccggatttgaaccggtggatactggtgttgcagaccattgccttaccacttggctactgcgccatacattatattatattaccatattttcaaaaatatgcaagtactttttgaaagtgactccaaggggatttgaacccctgttaccgccgtgaaagggcggtgtcttaaccgcttgaccatggagccttctcgtttctttacagtaaaaaagctccccgagttgggctcgaaccaacaacccttcggttaacagccgaatgctctaccattgagctatcgaggattacttcttctttattaaaagtatttccataccttcaaaaccacatacacgattatacatctttttttttcactttgcaacacttttccgtaatacttagatttgccttttaccagttacggctcgacttgcgtctcacctgcctgttttctgcctttggctcggcttctctaagtcttcaggtcaagccctcgaccgattagtaacagtcagctccatgcattgctgcacttccacctctgccctatctacctcgtcgtcttcaaggggtcttacttcctttaaggaatgggatatctcatcttgaggggggcttcacgcttagatgccttcagcgtttatcccttcccgacttggctacccggccatgctcctggcggaacaaccggtacaccagtggtcagtccaacccggtcctctcgtactaaggtcagctcctctcaaatatcctacgcccacgccggatagggaccgaactgtctcacgacgttctgaacccagctcgcgtaccgctttaatgggcgaacagcccaacccttgggacctactacagccccaggatgcgatgagccgacatcgaggtgccaaaccactccgtcgatgtgaactcttgggagtgataagcctgttatccccagggtagcttttatccgttgagcgatggcaatcccactttataccaccggatcactaagtcctactttcgtacctgctccacccgtcggtgtcgcagtcaagctcccttctgcctttgcactcttcgaatggtttccgaccattctgagggaacctttgagcgcctccgataccctttcggaggcgaccgccccagtcaaactccccgcctgacattgtcccaccgccgggtcacggcggatggttagaaacccaatactgcaagggtggtatcccaacattgactccatggcaactggcgtcaccacttctttgtctcccacctatcctgtacatgcaataccgaatcccagtatcaagctggagtaaagctccatggggtctttccgtcctggcgcaggtaaccagcatcttcactggtacttcaatttcaccggatgcattgtcgagacagtgctcaaatcattacgcctttcgtgcgggtcggaacttacccgacaaggaatttcgctaccttaggaccgttatagttacggccgccgtttactggggcttaagttcaaagcttcgacttgcgtctaacctctccccttaaccttccagcaccgggcaggcgtcagcccatatacctcacctttcggttttgcatagacctgtgtttttgctaaacagttgcttgagcctattctctgcggccacatttctgtggcaccccttctcccgaagttacggggtcattttgccgagttccttaacaatgcttcttccgtcggccttaggattctctcctcatccacctgtgtcggtttacggtacgggtacaatataaacaatagcggcttttcttgacggccggctcatgggcttccctactttaattcggtccgcgtaacgccttcggattgttcagcggatttgcctgctaaactcctacttcgcttgcaccggattttccgtttccggctcccactttccttccgtgtccccacagttctgttatattgcagtacaggaatctcaacctgttgtccatcggctacggctttcgccctcgccttaggccccgacttacccagagcagatcagctttactctggaaaccttagatattcggccaaaaggattctcacctttttctcgctactcattccggcattctctcttcttaacactccacggctccttacggtaccgcttcgtcgcgttaacaatgctcctctaccaatcacttgcgtgattcctcagcttcggtgtcgtgtttcagccccggacattttcggcgcaggacctctcgactagtgagctattacgcactctttgaatgtatggctgcttctgagccaacatcctagttgtcttcgaaatcccacatccttttccacttaacacgcactttgggaccttagctggaggtctgggctctttccctttcgactgcccaacttatctcgtgcagtctgactcccgataatcaattacacggcattcggagtttgatattcttcggtaagctttgacgccccctaggaaattcagtgctctacctccgcaaatctctatcgaggctagccctaaagctatttcgaggagaaccagctatctccgggttcgattggaatttctcccctatccacacctcatcgccacccttttcaacggatgtgcgttcggtcctccactacctcttacggcagcttcaacctggacatggatagatcacccggtttcgggtctactctgactgacttttcgccctcttaagacttggtttcccttcggctccgcacctttggtgcttaaccttgccagccagcgtaactcgccggaccgttctacaaaaagtacgcggttcacctcatacgggtgttccacagcttgtaaacacagggtttcaggttctctttcactcccctcccggggttcttttcacctttccttcacagtactatgcgctatcggtcactaaggagtatttagccttggggggtggtccccccgacttcccacaaggtttctcgtgtctcgtggtactttggatcctgctcgctcttctcggctttcatgtacggggctttcaccctctctggccggctttcccaaagccgttccattaaccttaaagtcactttctgcagtccgtaaccccaggatgcacgcatcctggtttaggctctttccatttcgctcgccgctactttggaaatcgagttttctttcttttcctccgggtacttagatgtttcagttccccgggttcccttccatacgttatggattggcgtatggatgactggagtctgtccagccgggtttccccattcagatatctccggatcaatggatatttgctcctccccgaagcttttcgcagcttatcacgtctttcatcggctcttagtgccaaggcatccaccctgcgctctttgtcgcttgaccttcctgtttctatagcgttagaagcagacggtctgtgttgcttggttttctttctttgattccttatggtttcccataaggcctcggatgtctctatcttttacgtttaacgttttttagatatttttcgtatatgcggttttcaaggtacggacggcatccttcttctgaaacatgcctagtggagataaagagattcgaactctcgaccccctgcttgcaaggcaggtgctctcccaactgagctatatccccgtatggtacatattcaatatgtagatttgttatatatttgttttttcttggcttacatgggcctttcctgctatggtgaaaggtcatgggcttaagtgggcctttcctgctatggtgaaaggtcatgggcttaagtgggcctttccttctatgacgaaaggtcatgggcttaagtggactcgaaccaccgacctcacgcttatcaggcgtgcgctctaaccagctgagctataagccctttttaaatctggcagccacctgctctcccacaccgtctccagtgcagtaccatcggccgcttaggtcttaaccatcgtgttcgggatgggtacgggtgtttcccctaaacgtatcgccaccagaagctttgagtacttggtgaggtactttcgaacctagtacgaaagctgttctttgcagcttggcgaggtcttttcgagcctagtgcaacagaacttcctcttcccttgataactcaacagtaaaacacattttccttacttcttcttttccttagaaaggaggtgatccagccgcaccttccgatacggctaccttgttacgacttcaccccagttatcggctccaccttcgacggctccttccctttcgggttcggtcaccggcttcgggcatatccgactcccatggtgtgacgggcggtgtgtacaagacccgggaacgtattcaccgcgacattctgattcgcgattactagcgattccagcttcatgtagtcgagttgcagactacaatccgaactgagacgttatttttgggatttgctccaggtcaccccttcgcctccctttgtttacgccattgtagcacgtgtgtagcccaaatcataaggggcatgatgatttgacgtcatccccaccttcctccaggttgtccctggcagtctccctagagtgcccagctctacctgctggctactaaggataagggttgcgctcgttgcgggacttaacccaacatctcacgacacgagctgacgacaaccatgcaccacctgtcttgcctgtcccgaaggaagggtcctgttacggaccggtcaggcagatgtcaagacttggtaaggttcttcgcgttgcttcgaattaaaccacatgctccaccgcttgtgcgggtccccgtcaattcctttgagtttcattcttgcgaacgtactccccaggtggaatacttattgcgtttgctgcggcaccgaacgcctttggcgcccgacacctagtattcatcgtttacggcgtggactaccagggtatctaatcctgtttgctccccacgctttcgagcctcaacgtcagttatcgtccagtaagccgccttcgccactggtgttcctcctaatatctacgcatttcaccgctacactaggaattccacttacctctccgacactctagctgcacagtttccaatgcagtcccggggttgagccccgggctttcacatcagacttgcactgccgtctacgctccctttacacccagtaaatccggataacgcttgccccttacgtattaccgcggctgctggcacgtaattagccggggcttcttagtcaggtaccgtcattttcttccctgctgatagaagtttacataccgaaatacttcttccttcacgcggcgtcgctgcatcagggtttcccccattgtgcaatattccccactgctgcctcccgtaggagtttgggccgtgtctcagtcccaatgtggccggtcaccctctcaggtcggctattgatcgtcgccttggtaggcctttaccccaccaactagctaatcaaacgcggatccatctcataccgccggagcttttcgcactgtgccatgcagcactgtgcgcttatgcggtattagcagtcatttctaactgttatccccctgtatgaggcaggttatccacgcgttactcacccgtccgccactcagtcataaagtacttcttaccgaaataatccgttccttatgcttcgttcgacttgcatgtgttaagcacgccgccagcgttcatcctgagccaggatcaaactctctgataaagtgttgaactttcgttctcgagttgtccaagttcaaaattaactttggctaatttatcccttttactgtttttaaggatttttactcatcccaaaaatgttacttttttagaattttcaggttaatgtgtttcactgtttagttatcaaagtgcttgctgttgtcggctgatttcttatctcagcagcaactcttaaatattaccacaggctgttgtgtctgtcaataactttttttatttctttttatcagttatttccgtatgactcacagcaacttttatataatatcataagcagtctgccttgtcaacaacttttttcttttttgctgtcatttcatacaattcacgacagctgtaatagaatatcacaaacaactttcattgtcaacaataatctaccattttctcattgactttttcagttctctgttttccagacaaataagtccaccggatgacaaccggtggacttatatcgtaccatttatgggaattattgtcaatacactatagcgatttttcaatcaatctcatcctaaaaagccctgcataaaatgcagcagaacattattattataccaaaagtttaaaaatgtatcctcctgaatcagttggtacatctccctgcaccaggcaaagtcgaaattgcataatacggtaatgataagaaaaaaaatccatacaattaaaatcccctgaactgctcctgccagccctccgccaacccggttaatagagcttaataccggcagctgcgctacgctttccaaagcaaaggacaacagccgaatcaatatcatggccagaataaaggacaaaacagcggcaatcccctttaccagcatatgagctatatacacagagaggtactcaccaaaggtaccaaccaccagttggctgtacccttccgcagtgttattcagcagcaagctgttcttcaaagactccggcaggggaagctcttctataatagaagactgcttttcaccatctccgtcaatttcctctgtgcctgacacataattttccatctgcgcctcacagatttcctgaatcttatcatagacaggggtctgttcctccaggaattcacttacatgagggcttataaaagaagccaatatcacagcaagtactaccgagaccattgagataacagttcttataagtcctctccggaacccattgatgattgtaaatatcaggaaagcaagcacaactatactaagccaattcataacatttctcctgtagatcttccgttctttttcaacggggaaccattatttaaacttaatggtactgctccccttatccgtcacaagcatgtacttattcatacccactttaaagatgtccttaatgttcccctcatcaatcgtcccgttaaacttctctactccttttaaactcataaggcagacctggttttcattattcatgattaccataccgtcactcagcttaacatttttatactctatgttaaaatctctttcaaataaaagccttccggaagtgctgtacagtctcatagtatattgcttggacttgttgtcgcttttaaatatgagacccacatggctgtcgtcataaaatgtactgacaatctctttcttcacatctacctttgtggcttcctttggaatctgttttcctttatagatagtaaaaccattgtcacggaaggccagggatgtgctctcatccagatatgccacctggggaaccagaatcccttcgtatgtataaccgctgactatgttatcaatctcattttgtccggcattaccgaagttataatatgccacgtaactagtggaaactccattctcaacatataaataggttaccataatcagctggccattgggagataccgccaaatccaccggataccccggactgtcaattctggtctggttttctgctatcacagtaccgtcagatgcataaaaattaatccaggtcttttcaccatcttcaagaatggctgccaccacaccctggctggccacctttgcctttaatatgggcagggaactgtcaactgcgccagaaggcccatcttttgaaaagatgtacatagctgtcccttttttatcagcaactactgctgtttcaccgcagatatccacctgtgggtcctgcatctcataggtctgattccagactacattctgtttactgtccagcagagcggcaccgtcgtttccatactttagtacagccccgtccaaatccacataatttttagaagaggtgtcttcttctgtgagagaaaaaagtacagaatatttatggtacacccgcttttggatcaccagcgttattaccaggattacaagcgcaatcaccgcagcaaggatgccggctctcttcagcattctgatacggtgtcttataatcttagctttgtaagcctctatatcattcccatcctgttgtatttgggccgctttctgtgcttttgcctttttcctctgcctcttccactttcttaacaggtttttcatagctatatccttatccttatgtattttccgtgtttgatttctttgagtaccagcgctctcattatatcatgccttcggcatgatcgccaatcgccactcgccaaaagtgagcaaagctccacatggctcgctaacgctcattatatcacactcttctacggtagtaaaattatttgtcccggataaatggtttcatcctccgacattccgtttgcactgcagatttctgctatcttggcactgtttccataatatttgttgctgatacttgtcagcgtatctcctctcttaatcgtgtagtactgggccacagactgcccgttgcttggctgggtagtatctgcattgtcaaaaggctttttggtatcctccggcacctggtgttcaatagactctgcctctttttttgcagaatcctcagcctccttgctctgcccctgctctttatcctgggtctcgtcctgaggctcctttccctggttctcagaggcaagtccatttacaggggtctcctgaatcacaggctctctgtccgtgtccttttgactgtgtgtgtcagctgcgcttgccactacgtctttggcatctttgagcttattataattattaaataagcctgtccccacagccaatgcaccaatcaggacacaggcaccggcagcatagacgagagaacctgcttttttctgaggtctcacctctgctttcgcctctacctttttgcggaagtttttcactgctttatcttccacctttgcctcatccctgggcatgttctcgttctgcgatatcaggtaattctgcatgggttcatttttttcatagtaaatatagaagcccagctgtctggtaagtttgctgttctcataacggtaaaacgcttcttccttttctgttggttccataacaaaaagaaccttgtcacttcctccaaaatgatccagatgtgtccggcaaatcacctcatggagctccattgagcatccgggaatggagagaaaccatcccacgatctcctgctctccaaaatattctttgtttttttcatacacctggttccagatatcatcggtaaataccagatagtcctcgctgatctccatatcgggaagggcaattgcactcttaacaaacaggtaagatactccatccagccagtttgtctgtcccagcaaaacagcagcctgtcctttgtccgacttatcatttgatagtctacttagataagtgtacgcataatcttcaatatatattttttgtgcttcattaatttctcctatctggcgtatattgttaggaattcgaaagtaaccctcgttccccactggcttttgtttttctttctcatatacaatttctatcatgatgtcacccctttggagacagaatagcacagcaatcatgcgaattttatcgtatcgtgaaaggcctgccttatttttttacgacgaaaaacgcacattaagaatattcttcgggcatcggggaaaactggaaaaagaaaggacggaatcagactatgactttttatataaacgcaaaggaacgccacgccagcattcgactggggacgtcccttttagactgtatgaggacccatcccataccctgggatgaaatcatttttctctgtattggaagcgacagaatcaccggggacagccttggacctctcatcggacaccagctctccaaataccacctggatcatgtacagatatatggaaccctgtcccatcccgtccatgcgctgaacctgtcagaaaccgtagaaaagatctcctgccgtcacccctcctccctcattgtagctatcgatgcttccctgggttctaaaaagcatctgggatttatcactgtcggaaacggcactatagctccaggggctggtgtacacaaaaagctggagcctgtgggagatgtctttatcacgggaattgtaaatcttgcgggaacctttgaacactttcttcttcagactacgaggctctccactgtagtctctatggctgatgccatcactaacggcattctaatggcttattatgaatacttctgcgaacgtcctctgcctttcctggaagtgcgccagccggaggaagaaggacgcctgcgcagctgggtaaatacaactccgctggctgcatctgcctcagaaccgtacggaaggcggtaattctggtacgtatagttagggccaaacacttttttaagaatccttttaaaaaacaaaaaggtttttttgggaatttttgtatgcgaataataccgtcctatctcacaggagccacaatatttatccgtcagggtaataataaaggtttcccaatgagtgggcggtgtaagcgtaaccggccacatatgctttaatattatctccttttccagaggtgtcatcaaaaaatactttgccgcattgcgaagggccgccttgggatgggtcatggcatggaaatgatctccggttttctccgtatgctctctccagtcatataaaaaaaggtcatgaagcattcctgctcttgcagctgcacggtagtccaggtgaaagaatctgcagatacggaaattgtagtatgcgacattcaggcaatgctgatagcagctggtctcgcagtgatgaggataatctttcatcttaagcactgccggatggtgcacaatatccttaatgcattcgtagaattcctcatttccttcatccgtcaccgtatgagcattgctcctgctccttttcctgtgatacatagttcctcttctagtcatagctctataccctcctgaaaaaagcatgcatcttataactaacagattgttcaagaaaagggtgcggccttccggctgcacccctgagacttcagtattattctataatatacacagattcctgtaaaggcctatgcaaatgcttttatggattcgtagatgccctgtgcatctaatccatatttctctaaaagttttactgcagggccggactcgccgaacacgtccttcacaccaattctgagcataggtgtaggagctttttctcccagacattcagccactgcgcttccaagaccgccgataatagagtgttcttctactgtcactaccttcccggtttcctttgcagctgcaactacaagttcctcgtccagaggtttgattgtatgaatgttaataacctttgcatcaatcccctctgctgccagtttctcagctgcttccagggatgcgcttacgcaaagaccggtagcaatgatagtaagatccttgccctctctcagcgtaacccctttccccagttcaaatttatagtcaggattagaattaataacaggagcagccaatctgccgaaacgcagatatacaggtcccacatgctcgtaagctgcttccactgctgctttcgcttcaatgtcatcgcttggatttacaattaccatacctggaatgcttctcatcagcgcaatgtcctcattacactgatgggtcgctccgtcttcccccacagagatacctgcatgggtagccccaatttttacgttcagatgaggatatcccacagagttgcgcacctgctcaaaagcacgtccggcagcaaacatagcaaaggtgcttacaaacggcactttacctgtagtcgccatacctgctgcgattcccaccatattacactctgcgataccgcagtcaatatggcggtccgggaatgcttttttaaaggttcctgttttggtagctgcagctaagtcagcgtccagaactactacattgtcgtgtttttctcctagtgccaccagggcattgccataactttctcttgttgcaatcttctttacttctgacataacgcttcacctaccttttctaagtctgccattgccactgcatactgctcatcatttggagctgctccatgccaggatgcctgattctccataaaggatacgccttttccttttactgtcttagcaattattgctgtaggcatgccctttgttgctctggcctcgtcaaatgcagccttaatctgatccatatcattgccgtcttccagattgattacatggaaattaaatgcttcaaactttttgtcgattggatacggagaacatacatcctcaatatcaccatcaatctggagtccgttattgtctacaattactaccaggttgtccagttttctgtggccggcgaacatggcggcctcccatacctggccttcctgaacctcgccgtctcccagcagtgtgtacgtgcggtaatctgcaccgctcatctttgcagataaagccatgcctactgcggcagaaatcccctgtcccaatgagccgcttgacatatccactccgggaatatgtttcatatccggatgtccctggagataggaacccagatggcgaagggtcttcagatcctccacagggaaaaatcctctctgcgccagagtggagtagagacccggggctgtatggcctttggataatacaaatctgtcacgatcagcttttttcggatccttggggtcaatattcatctcttcaaaatacaggtatgtaaagatatcagccgctgaaagagatccccccggatgtccagcctttgcagaatgaactgctgtcacgattcctttacggacttcattggcagttttctgaagttctaatttgttcatttttttcaccttttccttctttaaaatgtgatatatttattaaaacagggtgccctgctttattccctcttactctccgaatactgcgatataatccttctgaaacttttcaatcccggtcgtagttaacggatgttttgtcatctgctcaattactttatagggcacagtagcaatatcagctcctgccagtgcacactctgttacatgcatggtgtgacgaacactcgctgcaataatctgtgtcttaatctctgccacagcaaaaatatctgtgatagtccgaatcaactctgttccgttaactgaaatatcatccagacgtcccacaaaaggagatacatacgttgccccggcccttgccgccagaagtgcctgatttgccgtaaagattaatgtaacatttgtcttaattccctccgcagaaagaacctttaccgcttttaagccttccactgtcataggaattttaactaccatgtttttatgaatctttgcaatttccctgccctctgttatcatgccttccgcatctgtagttgtagccttaacttccccgctgattggaccgtcaatgatggtagttatttctttaattacttcctcaaaactgcgtccctcttttgctattaatgagggattggttgtgactccgcagataacccccatatcatttgcttttctgatatcttctacatttgcagtatcaataaaaaacttcatatacctgtctcctcctggttttggcacacctctgatttacgttttcagtataacacgtatcagcaggcggtcaagggggcgcagctcttattaataaataattttattaataattttcatttttattaattttaatcatcatacgtttaacatttccgcccaaaaataacgctgcttttacatatgagagaaaaattattattaataattttctaaaatatatttaattaattatttttcctataatgttttctggcctttgcataggaagttgtctttctgacgataagcttaggttcatattctatatgatagatactggtaggctggatcccagaatatggattgttagcggaattgatttttcttatgataatgtcacaggcatctcttcctttcaggggtacaaaatgttcgatggtagtcaaagacatgcggtgcatactggaataaaacgtattatcacagccaatgaccgagacgtctgcaggcactttatatttttgatcctgcagggcatcaataatcccaaaggccatcatatcgtttagtccggcaattgcggtacagctaaattccccggccagaagctctttcgtaagattatagcccatcttatactcggaatcaatgttcggaataatcttgtccagagcatcgtccgcggcttttatgatgacatgccctttcaggccttccctttcaaattcactgacaaacccctccacccttttcgagcgctgctgctgccgtttggtcagaggcggcgtgataaacgccacatcccgatgtcccagatccaacagatgacgagccatcagccttcccactttggtattatcctgattgatcgcatccacttctatagtcttttctctgttgctgataatcaccagagggatctgctgcgccagttcttccacctgctccataaagctcctgctgggattacaggtatagataattccctggggacgcaccacgggcatcatcttcagatattgctcttccagcttcagttctctttgagtattgcagacaaataccccatagcccttttcttttgccactgcctcaattccctggagaagcataacatagtaagggttcgttaatgtaggacagaatactacaattaatttgtggactttgctgtcgctatgattccttcttttggggattacataccccatgtccctggcggcctgttccacgcgctctatggtatccttggaaaaggacacattgtattttttatttaataccatggagaccgtagcctgtgataccccggccgccctggctatatcaacggatgtcaccttttttttcaatctatccccatccttctacaactctacccgcccttccagggcacgaagcagcgttacctcatcaatgtattccagatcgcctcccactggcacaccgctggctattctggttaccttaattccggtaggtttaatcagcttactgatgtacatggcagtggtttccccctccaggctggaattggtggcaatgattacctcgtccacgtcctcctgaagacgctgcattaattctttcagcttaatgtcattagggccaattcccagcataggagaaatagctccgtgcagtacatgatatacaccctcaaactttcctgttttctcgtaggcggccagatcccttgtattttccactaccataatggtcttctgatcccgtctgggattgctgcagatagggcatagttctttgtctgtcagcgtataacagcacttgcagtactgtacgttctgtcttgcatccaggatagaggccgacagctgttctacctgatccttgggcatattaataatatgaaaggccaggcgctgcgctgatttagcgccaatgcccggcaatcttgatagttgttcaattaacttactgatatgactgctaaaatagtccaagatgtctctcctctagaacggcagaccggaccctaacccgccggttaatttcgacatagcctttgccgtatcctcttccatcattctcagtgcttcgttggcggctgccattatcaaatcctccagcatctctacatcatccgggtctacaacttcctcgtctaatttaaccttcgtaataacctttttgccggataccgttatctccactgcaccgccgcccgctgctgcggtatattctttttcctccagcatcttctggttttcttccatctgcttctgcatcttctgtgcctgcttcatcagattgttcatattgccaggcattcccatgcctccgggaaatcctccgcgttttgccatcttataacctcctgtttacactctttattctattcataatggcaggcagtggttatctgccgcctctgtcctctatcataccacactctagaagtcatcttcaattacaacatccatgtgaatcttatcttttaaaatatcatctacagaaatctctgccagtccggtacgggcttccttgttgtcccgctttattatcagttcaagctctatggatttgcccagttttttctgaataatattggacaaggtgactgcattttccggattgtcgatacaagcctgtgccaggtagctctgaaactccacataaagcttcggctcccctgtatctccattatatttgggaacggaattctgaagcatctgatagaacagtccagaagtctcccggatcaggcttttccagttctgcttaatatactggagatcctctggggcggccactggaggttttatcggctcctttacctctgcctcctcctgtttctggggaagggcttcctttcctgatgacgcagatgcctggaccggcactccactctccatcttatcctccaggattcggatacggtccaggacagagtccaaatttgtctccatagcaggtctgcacagctttattaaagcgatctctaccaatacccttttttggcttgcatagcggatctgattggaaagctcagagaacacccggatatatctcatcagagtatcactgtccaccatccggctctcctcctccagcaattttctgttttccgtggatacatccagaacatcctcgatattttcagacgttttaaccagcagcagattgcgcatataccagacaaaatccgagacaaactgtcccaaatctctgcctctggtaatcagttcctccaaaacctgaatggcgcctgtgacattgccctccagtacttttctgagcagtttgctgaagacttccgtatccacagctcccagaacatccagcaccttgtcgtaggtcagcgtctcccccagataaaaggcgatacactggtccagaaggcttaaggcatcacgcatggatccatctgccgccttggcaatatagcggattgccttatcctgcacatctaccttctcctctgtcatcagttcctgcagccttgcggcaatggtgtcaactgtgattcttcggaaatcataccgctgacagcgggagagtatggttatgggaatcttgtgggcttctgtggttgccagtataaaaataacataggaaggaggctcctccaaagtttttaaaagagcattgaaggcgcctactgaaagcatgtgaacctcatctatgatatacactttatatcttccctgcgtgggccggtaagcaacctcttcccggatttctctgatgttgtctacaccattattggacgctgcgtcaatttcaatcacattcatggaggtgcctgcggagattgccctgcaagtctcacattcattgcagggactcccgtccacagggtgctcgcagtttactgtcttagccaaaatcttggcaatggtagtcttaccagttcccctggttccgcagaataagtatgcatgtcctattctgtctgcttttacttgatttttcagtgttgtgacgatatgctcctgaccctttacatcctcaaaggtgtctggccggaacttgcggtaaagagcagtatagctcatgaaaattctcctattctaatgtctttccagtccggaattaatctccgaagctgatcccaatacgtttagcctcttcaatcaggggatcgctgggggaaaccatcttcagcttgccggcgcattcctccagcggaacctttttcattcttccgtttacaataccaaccatgtacccgtattcttctttcatgatcaaatcagcggccgctgatccaattctggtggacagcactctgtcatatggacatggacttccccctctctgggtatgtccgggtacggtgattctgatgtccgtacctgtagcctttgcaagcttgtcggcaatttcgtaagaaacagagggatattttcctgctttttcctccattttcttcttcagctccttcttggacaatttcgcgtcctccttggagatcgccccttctgctactgcaaggatggtaaatctttttcccgccttgctccgcttgtcaatagcctccacaatttttttataatcatagggaatctccggaatcaaaataatatccgccccgccggcaattcctgcatgaagtgtcagccatcccaccttatgccccattacctcaacgataaaaacgcgaccgtgagatgctgctgtggtatgaatacagtctatagcttccgtagcaatatttgccgcactctgaaaaccaaaggtcatatccgtaccccagatatcattgtcaatggttttaggaagatggagtacgtttaatccttcctgtctcagcaggttagcggttttctgtgacccatttcccccaagaatcacaagacagttcaaacgcagcttatggtaggtctgggtcatagcctcaaccttgtccagtccgttttcatccggcacccgcatcagcttaaacggctgtctggaggtgcccaaaatcgtccctccctgtgtcagaatccctgaaaaatccttggaagagagcattctgtaatttccatatattaaacctttgtatccatcgtcgaatccatatacctctagttcgtccagattactgctaagacctttcaccacaccccgcatggttgcattcagggcctgacaatctccgccgctggtcagtaagccaattctcttcatattgtcacatccaatctttttaatatgaactcattatataatattttattttttataacaaggggaaggcgaatctggcttatttttctcaaatcaattgacaaacttcccaattcaatgtatactataagtccgtgcagccggggagttagcggtgccctgaacctgcaatccgctacagcaggggtgatgccaaactgaggcttttatcttgtagagctgccctctataagtggcgttgacgtctgggtcttacgcaacagaactctatgaatcgtgtcaggtcaggaatgaagcagcactaagtagaatcttctgtgtgccgtaagggtgcctgggccgagttaactgtagaggtaacgtctatggggtggagtcgaagggcggcgcacgtaaaaaattaatttatcttatattcaaatctgaggtacatactctcattatttcatagaaattatctattccccacgcttacaaatacataagatacccgatgacgctccgcccgaaatgcatcatctttttttgatgcccggattacgccaataacttttgaacttatttgcaccagtattttgttatatttccgttttattcataatacaatgaactaacccttaacccttaaggaggcagacaaccatgcagtcatggatcatggaaattatgaatacttacggatatctgggcatcgccctgttaattaccatcgaaaatgtattcccccccattccttcggaggtcatccttacctttggcggctttatgacaacctacactaagatgaacatcctgggcgttgtcctctcttctaccgtaggctctgtgttcggcgctatcatcctttatgaggtggggagcctggtgtctcaagagcggctggagaaaatattgagcggacggctgggacatctcctccatttcaaacaggaggatgtgggaaaagcaatacgctggtttgacagccagggaaattacacagtccttttctgccggtgtatcccaattgtgcggagtctcatatcaatccccgcaggcatggctaagatgtctcttcccacctttctttttctcactaccgtcggcagtaccatctggaacctgcttcttgtcactctgggagctatggccggggcttcctggcagcgggtggtcctctatatgaatacttactccgatgtagctgtggctgtcacagtgggcggtcttttattgggcctatttattgtctaccggaaaagaaagaaaaaataaagagagggacggttcagactgaacacgtccctatttcactacatccccgcggcttgttacgattcggtagccgatccgttccatccgcttttccagcaatgctttatgttcagccgcctcgagcccggtacaggccttattgttgtaaaggctgtacagctttctcaccgacaacggcgaaagattaggcattaccacattggctccggccagaatccccagctctcttccttctgaatgcaaagtgcccagggccgtagtcgcagggatcagcgcatgtgggaagagcagccttaagatagctgtgagattcaggcacattgtcaaatccccctttttttcttcccgaaagggggtatctttatgggggagaaacggacctatgccaatcattgccggctgcagttcctggagaaacctcagatcctcaattagatactcgggaatctgcccgggggaacccaccataaagcctgatcccacttgatatcctgtttcctttaaatgaaaaaggcattgctttctgttctccaggctgagagaagctgggtgcagctgtctgtaatgtgtctcatctgctgtctcatgccttaacagatagcgatccgcaccggcatcatgcagtttcttatagctctccctgcttctctcccccagagacagagtaaccgcgcagtccgggtattcctttttgattccggtaaggatgctgcaaagccggtcgtccgtataatatccatcctctccgccctgaaggacaaaggttctaaagcccagggcatacccttctttgcagcactccagaatctcatcttccccaacacggtatcttgtcaaatctttattgcttttgcgtattccgcagtagtaacagtcatttctgcaaaaattggatatctctatcagcccgcgtatgtagacgtctctgccatacaatttctgccttacgccagcagccgtctcgtagagaaagctggtaacccattcgtccctgcaggtaatcagcctccccaaaaaatcatcatccgcatcctttcgtttcgccagctgaaggattcgttctttgtattgttcttcgttcataattaaagtatctccctatctgtcctcctgcatccggtatcccaccccgacttctgtaaagatatactttggctctgcagggtttttctccagctttctccgtatattagccatatttacccggaggatctggttgtcatccccggcataaggcccccatatttctttcataatatggtcataggtcagaacctttcccgcattcttggcgagcagggtaatcagcttatattctatctgggtcagatgaatgctctggccctccagcatgacaagccgttttccaaaatcaatctccagcccttctacctgatatttttcggaggagtttccagctttcactttgtcgtggtgacgcagcgctgtcctgatcctggccataagctcatccgtaccgaagggcttcgttatgtagtcatctgcccccagatccaatgccgctactttctccttttcctgggttctggcagatattacaacaataggagtttccgcccattcccgcacctgctttataatgtccagtccatccatatccggcagacccagatccagaaggattacatccgggcaatgggaagtgatagcgcttaaggcctcttttcccgtgtaagctttaatcaccttgtagtttcgggaatttaatacagtttctacaaaatcagcgatgtttttctcatcctcgataatcaaaattaactctctgtgatccttcatcttgcttctccttccaacggaagagtaaaaataaattcggccccatctgaatggtttctggcctcaatgactcccccatgtgctgttataatacttttacatatggacaggccgatccccatccctttcgaggaatcgctccctcttcctctttcgctgctgatgccgtcaaaaagatccggcagtttatcctctgcaattccgattccgtgatccctcacctgaaacagtaccgtgtccttttcttttgtaacagtaaactcaattggccttgtactcccggaatgaagcagcgcattttccagaagattgattattacctgttccaccagtgtggcgtccataggcaccatcaggaaatcttccgggactgtggtgcgtatctctgcccccggatatctctttttcagtcttatcacgccctcagataccacttcctccagaggctccggagatttattcacctttgtattcccctcccggatccttgtaaccgacagcaggttctccaccatatgcagcagccaggtagcatcttctctgatatgatgaatcagctcctctttttcctcctcttttaacgtatcctttgcttccagatacaaatcgctggaacctatcatgctcgtaagaggggtacggagatcatgggaaaccgcacgcagaagattggcccgcatcttttccttctctgtctccacctccagttttttctgtgattcatagagctttttattcatctcatctctctcttctgccaatcttgtctgctctttcatactggtcgtggtggcgctggtaataaatgaaatcaccagcatcccaataaatgtagccggataaccatctctggtaaaatcaatctgccagaatggataggtaaaaaagaaattaacccccagaacgccgataaaacaggatattatcccccaaaaataccctgacgtatatctggatataagaacggttgccatcatatacacaattgccatattcgtcatactctctgtggtatggtaaaaccagtaggccagcactgtggccagcagaagcagcgccattgttactataaaatccttaagtcttttcatttacggccgttttcctcctcatattttatatggcacaatacttatgccggcccgaagggcatgaattattcctttggtattaaacagtataccgcaattttttctgcttgtaagcaggtaattttccatttttaacgctttctttacggaagtacttattttatcatgttatattggatttgcgtagaatttttggagaaaatatggaaaggaaataaacacatgaaaacaagtgacatactcatcctcctgggagggcttgccctttttctatatggcatgcatatgatgagcgacgggttggaggcggcagccggcaaccgaatgaaacgcatcttagaaaagcttactgccaaccgctttcttggcattgcagtgggtgcaggcataacagccgtcatacagtcttcctcagcgactactgttatggtagttggttttgtcaactcccgtctcatgacgctccgacaggctgtctggattattatgggagccaatatagggacaacaatcacaggccagcttatcgcccttgacatcagcgcaattgcgcctcttatagcttttatcggggtctccatggtggtgttcctgaagggagagaaaaatcatcatttcggggctattattgccggtctcggagtactttttatcggaatggggatgatgagcgacgctatgatgcccctccgggattcccaggggttcatccatctgatgacccagttttctaatccgcttttgggaattctggccggagctctttttactgccgtgatacagtcttcttcagcctcagtgggaattcttcaggcactggcctccagcggactgatcggcctttccagttccgtatatgttctgttcggacagaatatcggtacctgcatcacagccgtgctggcctccatcggcaccaaccgcaatgcgaaaagaaccaccattattcatctgctgtttaataccattggcaccggtatcttcgtctgcgtctgtatgatgaccccatttacgtctttcatgcagtcactgacaccagacaaccccgcggcgcagattgcaaatgtacatactttgtttaacatagtcaccacgctgcttcttcttccctttggcaattatctggctgctctgtcagaaaaactgcttccggataaaggagaggcggaagaaggcggccattccctgatgtatctgcacacccttccccacgccggagattacaaaataggctgggctgctctggctgtttcccagctccagcaggaagtataccgtatgttccaatttgccagagaaaatgtgcttctcagctttgagtctgtggagcaccgctctacaaaaaaaatggctcaggttctgtccaatgaggaatacctggattatctgaatatggagatatccagatacatctctaccctcatggcacaggagatgtctcacaaagacagtaaaattatcaatggctattttaaaatagtagggaacatcgagagggtgggagatcacgctatgaatatcgcagaatatgcagaaatgctttgcgataaagatcttaaattttcttccacagctatccaagaaatccagtctatgaaagcagtatgtctgactacgctggatcagcttgccccccagaagtcggtctcccccctccatattctggaacaggtggccaaatatgaacagcagatcgatgatatcaacgcccagtaccgtcaaaatcaaatcatacggatgcaaaacggaacctgcctggcagaaaccagtattctttattctgagatgcttacggatttcgaaagaattggcgatcatgctttgaatattgccaaagaatacacaacgatgtgggaaggggaaagcaaagagatgggcatcgcagccacagaaaatctatagtacccacatagaaacagccattctccagttattgccgactgctgagaatggctgttcttatattgctggattctactgtcccacggcctcctgttcttcccgttccccttccaggctgggctgtccgatgtaagcctcggcgatatttacacaaaggctgcccatccgctccatactatacaatatggttgtaaaggctcccgtaagctctggactgcattttccttttttcagtctctgtacatgattttttctaagtttattttcctgtatctgcagttcgtccctttgctgaatcaccttaaaggctgccgcccggttatcgttctgcactgcatccatggccgagagaagcattccctctattttttccagcatactttccatttccttctctgcctccttagagaacgcatattctttgccctcccggttatcctccaggcgctctctgcggaccttggccacttcctggcacctttggctgattctgtccacatcgcaggctatatacatcaggctggccgcccgcatggactgcacctctgtgagtgtaccgctggcaaaaagattggagataaatttttctatctggccatacagatgctcaacaacgtccctcctctggcagacattttcccatacagcggccgctttttgatccattgcttttctcgcctcacttatcatttcctgcaccatgtgtgcgcagcgcacaatctcctcattggcaagatgcagcgcgaatactggctggcctgccatcttatcgtccagaaactggggctggctttctgtgtccaccacatcctctcccggcacaatcttagtgacaatcttgaccatcagccagataaagggaatccacagaagcgtatttgccacattgaacgctgtatgagcatttgctatctgtctggaaatcacatcaatctcatttccctttggagagataaactctacaaactttgcaaaccatgggatgatccagataaagaggaagcttcctgtaatattaaatacactgtgggccactgctgtccgctttgcatttttagactgacctacagaggccagcaatgcagtaattgttgtcccgatgttgtctcccagaagaattggaatagctcctgtaagtcctatgacactggatatcccgtcaggtcccgcctggctggcaaagttctgcaggactgcaattgtggcactgctgctctgcaccaccagggtcataaccgtgccaagcaggacacccagaaccggaatgtgagaaacttttgctatcatatcggtaaatacagggctggctgccaaaggcttcatgacatcccccatggtggtaattcccagaaataaaattccaaaagcaaatatggtctgccctatattcttagctttttccttcttacagaaaaagaaaattacaaatccaatgaaaataataggccatatataatccgtaatcttaaaagcaataatctgtgcggtcatggttgttccgatgtttgcgcccaaaatgacagaaatcgcctgaggcagcttcattaagcctgcactgacaaatccaatcaccattactgtagtggcactgctgctctgcaggaccgcagtcgtcagcgctccggccagtacgcctacaataggattctttgtgagaatccccagtacatatttcattttctcccctgcaaccttctgcaggccttcactcatcatattcattccatagatgaatacagctaatcctcctaacaacccaaacactgtccgcatcgtctcattcatatactttttctccgttaactatcttttcttatctcttgtttacggtccaagtatattggttgtatgttaaatctatgtaaaactttaggtaaaatttaagtaaattcttccaaaagactgccatttgattttacataagaaattcgggcggccggattataacgccaaaagagagcctttaaaagactctctttctgacttctcttatatattccggtgatgttccgcagcatccaccgatgagatccgccccggcttttaccaaacgctccatgtgtccggcaaattcctcagctcccatccgatataccgcattcccctcttcatctatcacaggcattccggcattgggttttaccagaaccggtattttaacatttttcttgatcgttgttaccactgcttccagctgatctggtcccacagagcagttaatccctaccgcatctgcccccatctcttccaggctgaccgctgcctcaagaatatgtccgccaaaaaagaggctgccgtccgcttctacggtcatagaacacataaccgggagatcgcagatttcatgggcggcatccagaatggccatggtctcctgaatccctatcatagtctccgccaccaaaagatctacccctgctgtacaaagacttctgatctgctgcgcatatacctcatacaattcttcatagggcatgtccatctttccggtcgttgttatatcgcctgcaaccagacaccttgtgccaactgcccggcgtgttactgccaccagctctctgttcagttcctctactttatcttccagtccatgccccttaagactcacagcattggctgcaaaggtaggcgcatatacaatctgtgaacctgcatctgcatatcccctctgcaattctgtcaaaggctggggattttggactatccactcttctgtacatactcctctgggcatccccgcctggatcaggttagagccagtggccccatctagaatcacaggtctgcaggctattaaatcattccattccctttttgtcatccgtcacctgttcctttcttttctttgcttcccgaagttccttaaaaaatccgctgagcatcccgctgcactcctcttccagaatgcctctctcaacttctaccttatggttaaatccgtccatctccagcagattcaggacagaaccggcacatccggccttaggattcatacttccgatcactaccttgtcaattctggcctggacaatcgctcctgcgcacatctggcagggttccaaagtaacatacatggtacatccctccagcctccagtcccccagctttctgctcgcctttcttatagcattcagctctgcatgggacagcgtattcttgtccgtattccttctgttatatcctctggcaataatccgcccctcagaaacaatcacgcatccgataggaacttcccagagagcatacgccttttttgcctggcgtatcgcctctttcataaacttttcctgttctgtcataaatcttcctttatattcactaaaaatatatcatacattctaacacgttatgataacttgggcaaataaaaaatactgctaaacagtaaataagtcaactgtttaacagcattttcagcagcggagacggtgggattcgaacccacgtgccggttacccggcaacttgatttcgagtcaagctcgttatggccacttcgatacgtctccataataaatgagagtgatgttccattagtagtataaagcttgtccgggattccgtcaatatttacttgctgttcttttgccaaagttcctctgtcttaagctgaatttcttgagttcttgcagattccgggtatttttactataatattcatagtagaagtctgcattcatgcatgatatggaaaaggagaacaattatggcaatccacggactgaataaaaccactttattagactaccccgggaaggtagcagctactatattcctggggaactgcaatttccggtgtcctttctgccacaacagcggtctggtgctgtcagccgatgaccagcccgttattcccacagaacaggtcctatcctttttgaaaaaacgaaaagggattttagatggtgtctgcattaccgggggagaacctactatagacaaggaattaatttccctgatttatgagatccacgatctgggatatcccgtaaaactggatactaatggttcccatccctggatcctaaagaagctggtccagaatcaccttattgatatggttgccatggatataaaaacagctcaggaatcctatgacaaagtatccgggattcccgggctgaatctgaagcctattctggagtctgtagattttcttatgacaggtgcaatcccctatgaatttcggactacggtagtccgggagcttcatagtgaaaatgatttccgctccataggacagtggattgccggatgtgacgcctattatctccagtcctataaagactcaccagaggtgatacggccaggctttacaagctattcgcttcaggaactggagaacttccgcaggattctgtcagaaaccatccccctggtagagatccggggtgtcgattaagcgataccaatagccgaactgccccatttgggaagcagcgtcttcttcctctgaaggccttgcggccttaaaattaggaaatccaaacatcacggccatgaatttttcctgatgatcatagattcccggcactcccaatatgtattgttttgattccttttccctggcaaacagcagatggtgataattgtaatatccatgcagaaggaaattattgttagccaatgcctgatcccgtctgctgatacgctccagatccctggggattattttgtaacactccatcatatcctggtcgcaaaatggattgaatgcttctttttcctcttttaattggcggatatcctctatctgctgtatttcttctatggttaattcagggacgctgtctcctgtctcctgggggccggcttccgatgccgtttcatttacttctgcaacagggggctgctccggctcctgagatgccggaacaccttccgactcctttatctcttcctgaacctcttccttccgtggttcctggggactttcatttaccggaggtacttctccctctccccggttctcctgtgtaggttcctctttatccatccacgagaaggagaactcctgtatacgtataggcacatcatcccattccgttccatacattttctggccttctcccagaaggataatgcctcccagatccccaagcttatattttgtgtttcctatctgctcctcgctggtctggactctgcattccagcttatcccctctgggggcgcagctccctaaaaatatggcgcggcactctttaccctctcttgcataagcataaatgctgcacttatcctgtccctgaatgcctgtaaggtgaaagtccattttgcacacgctgtttctggcttcaactttgataaatcctctattgcttcccttttgctcctgcatatactcatacacataagcaataaaacgtttatattctgacacagcttccctccataatttgtttctattccataatatatatgccgcaaaagacaaaatagaactatctgtgccaactttgccacctaatccggtgcctcatcgtcatccgggagaataagtctggagggatccgcccgtttgctgcctggtactacaatggttccatctgagagaaatgtatttcccgcaggtgttgttacactattttcctgtgcgtaaaaagtgccgtggggagtccttatcctgccgcctctggtagcataagagtattggtcgggactgatagatatagtctcttcatccaccgatatggcaatctccagatagcggatatccgcggaaatcctgaagctgtattctccctccagcagttcaaaagacacatccggcactccataaacacagtatatactaatattttgccgggcccggacggtaccgtcctccctacaaagggcaatctcataggttcccgacgatagatccgttaataaaaaggctccctcagaatctgtgactgtggtcagtgactctccctgaaatgtcaggatttgacctgccgccggcacaccatccgactcccataccctgcctgccagatgaaaattcttatcggaaggcccggtttctgcggactgccccccgtggcctatatccggaatccgcgcatccgctgccccccgccttccctgtgcatagccaacggcaccagagacactgacagccatacatagaactataatccatacgcgggacttgttcagaatgaatggtccttttctcatttgcttttctccccctttagatggttgatccagctcaacattgctcctcttccccgtgcggcagtaaacgctggtatttcaggcctgtgcttcaataggtacaccttttacctctgggagaaaagcattgaaaaactaaaaaaaccgcccaaagggacggcaaattttgtatggtaaaggccgaaataaaaggtgtaccttttgaagcggcatcgtatcatatccgcataatatagaaggcaccaggagcttcacttcgacatgttttgctatagtctattgctattctgctgttagaatactactatttttgccaaatagcaatgcggaaatacgtgcagaaatttttgtataaaaacattgacatttgttatcccaccctatataatattagttgctgaacatcgaagcgtggctcagtttggtagagcgctgcgttcgggacgcagaggtcgcgtgttcgaatcacgtcgcttcgactaccttggcaggggcaccgtaaattcttttttaagagtttacggtgtttttttctacagtaaaatctactataaacattaaggaaagaggattacgtatgaaccagctccccgatgcattcctatccaggatgaaggaaatgctgaaagatgaatatactgcatttgaagcaagctacagccttccgagacaatacggtctccgggtgaatacattaaaaatcagttcggaagaatttcaaagaatctcccccttccatcttactccaatcccctggatccccaatggattcttttattccgaagaggatcggccggccaggcatccttactattacgccggactctactatctgcaggagcccagcgctatgacacctgcatccaggctggagattcagccgggggacagggttttggatctttgcgccgcaccaggagggaaggctacggaactgggggcacgtctgagaggagaaggccttctggccgccaatgaaatcagtaattccagggcaaaagcccttctcaaaaatatagaactgtttggaattcccaattcgtttgttctaaatgaggtcccttatcgtctcgcggaggtttttccggaatactttaataaaatcctggtggatgccccctgctccggtgagggaatgtttcggaaggatcccgccgtggccggaacctggacaccggaacgtcccaaggaattcgccaagctacagagagagattttgcccgctgccgctgctatgctttcacctggaggtctgctcctttattctacctgtaccttttctccggatgaaaatgaaggtgtgatctcctttcttttggaatccaatccccagctccgtcttctgcagatggaagggtatgagggattctcccagggaaaacccgattggggcaatggaaatccggaacttcaaaaatgtgtccgtatctggccgcaccgcatgaacggagaaggacactttatggctctttttcagaaggaaggtatccctctggagcattcagggacagaaggcagccttcgcctaaggaaagaggatcgcaagattctggatgccttttttcaggacgttaccatgcctctggattggagccgggtagaagtacggggatccaaggcttattaccttcccagcccctgccctgcagtgcggggtccccgttttctccgaaacgggctctgtctgggcgaactaaagaaaaataggtttgagccaggccagcctttggctctggccatgaaaaaaaatcattatccatctgtactctccctcgtcccggaagatcccagggttatccgctatctgaaaggtgaaactctccccgtagagaggcacgagacaagccgctctgaaggatatcagctcgtctgcgtcgacgatttccctctgggttggggaaaacttgtcagaggagtattgaaaaacaaatatccggcaggatggcgaatccgttgatcccacataaacacattctgggcaggtttttgcaaattataggtttgcatttgtaaatttctggattgtttagttttcattttatttggcatacactataaaaaaggagtgtgtctgccatatgaataaaaaacgagagcaacaatacagagaactaggtcttacaattgcatattacaggaaacttagaggacttacacagattcagctggcagaggctgttgacttaagtcgtacacatataagtaatattgaagcaccaaaggtgaaaacgtctatctctctggataaactattcgatatcgcagatattctggaagtacctgtgaaggatttatttgatttccgctcataaaaaaggctgctgtacacaaatcggtacagcagcttttcaattctattacagttccccaatcgcttctgccggctcttcagccatagcctgttcgtatttttcaagtataattgattggatacgttctctcgtattggagttgatgggatgcgcaatatctctgtactctccgtctgttgcctttctgctaggcatagcaataaacaatcctttttctccttcaatcaccttgatatcatgcactacaaactcttcatcaattgtaatagatactactgctttcattttgccttcttttgctacttttctcactcttacgtctgtaatgttcataccctaagcccctttcataagccttctcttttttattgttaaagcacgtacctctcgttcttttccactactactttgatcccatcttctccgcagtagtaggaatttgcccgaatcgtatcacggctttctacaatacaattttcgatatgtgtattatcccccagatatacatcattcaaaattatggagttttttatcacacagttattgccaacaaatacctttttgaaaagaatagaattctctacctccccattgataatgcatccgctggatattaaactgttctttatcgccgccccgggattatattttgccgggggcagatcgtcaatcttggactgaatctccggatactggcggaagaaataatttctcacttctggtttcaggaagtccatattggtcctgtaataagattccacagaagatatattgctccagtaggtatttatcttatatccgtaaatcctcttaaggttcttgtaacgaattagaatatcctttacgaagtcgtgcctgtcctcctgggcacatttctcaatcagctcgatcaactgtcttcttctgattacatagattccagttgagatcgtgtttgagtatgacaccattggtttctcatcaaattcttcgattctgcagtcctcattcattttaaggactccgaacctgctggtatcctctccgttgacgtctgtgcataccacagttacatccgcccgctttgcaatgtgatactccaataccttattatagtccagcttatagatgccgtctccggatgcgataaccacatacggctcatgactgttcttcaaaaattggagattctggaaaattgcatccgcagttcctctgtaccaattgctgttgtcagaggtaattgtgggggtaaatatataaagtcctccctgctttcttccaaagtcccaccatttggaggagctcagatgttcgttcagggatcttgcgttatattgagttaatactgccaccttctggatatgagagttggacatattgctcaatgcgaaatcaatactgcgatagcttcctgcaattggcatagctgcgattgcccttttattagacagctctctcatcctgtaattgttaccgcctgccagaattattcctattgctctcatgattcctcaccgtcctttatcaatgtttcaccgctctcaagtgtgccgtccggataatcctccggaagtgtcctgccggaaattgctgtattcttgccaaccttaacattggatgggatctcggaattctctcctatggttaccagcccgaaggaatatacttttggttttactttattcggtacatcctctcctactccgaggactacatcatccccgacctgtacacattctgcaataatggatttgtcaatcacgcagttcctgcccactgatgactgcctcataataatagaatcctttactacagtacccttgcctatagtaacccccgcaccgattacagaattatgcacctctccgtaaatctcgctgccctcgccgatgatacagcgatccaccacggaatcctctgaaatatactgtggcggaataatgtcacccttagtatagatcttccagaattcttcgtagagattaaactccggaatgatgtcaatcagctccatattcgcttcccagtaagagcccagtgtacctacgtctttccaatagccgttatactcataggcaaacaatctctgacccttttcatgacaatagggaagtatatgcataccaaagtcacaattgctctgatctttcatagcgatcaaagcctcttttaacactggccagctgaatatataaatacccatagaagccagattactgcttggtttctctggtttttcctcaaattctttgattctgctgacttcatccgtcaccacaataccaaatcggcttgcctcctcaataggtacgggcattgttgcaattgtcacatcagctttattggccttatggaaatccagcatcacctcataatccatcttgtaaatatgatctcccgataaaatcaacacataatccggattataggtctccatatagtccatattctggaatatcgcattggctgtcccggtgtaccactcactgttcgtactcttctcatatgggggcagcacggtaaccccgccaacatttctatctaaatcccacggaattccaataccaatatgggtattaagcctcaaaggctggtactgtgtcaatacacctactgtatcaactcctgaattaatacagttactgagcggaaaatcaataattctatattttccaccgaatgctaccgcaggttttgcaacttttgccgttaaaacgccaagcctgctgccctgtccacctgcaagcagcatcgcaatcatctctttcttaatcatgcaatcacctcttgtcctatatatgatttctctattatatcataaaagcagaaattagtgaacatttttaacaaaaatttaaaaccatattctgtctttttgtgacatttgttgagctttttcttcggtttcccgttttttgtgcattttaaacatagttatttccacctttttcattgatatgaattattttcctcgccttcatgttccaaaatatagaaagagaagaaatccttttcaattctggaagttcagagtataataactctagagaaaatatatgaaggagtattaatgtactatgtatcagatagattttaaaaaacccatgcacatccatttcatcggcatcggtggaatcagtatgagcgggcttgcagagattctgctccaggaggattttaccattaccggatctgattccagggaaagcagcctcacccggcgtctggaggaacagggggcccgtatctattacggacagcgtgcctctaatatagaagaaactactcagctggttgtctacacagcggccattcaccctgacaatccggaatacacctgcgcggcagacaagaagctgcctatgctgtcaagggctgagcttttaggacagattatgaagaattatgatacccccattgctgtctccggcactcacggcaagactaccaccacttccatgatctctcacctgctccttgagggagaactggatcccacgatttccgtggggggcattctgcctgcaatccatgggaatatccgtgtgggttcctcggaaacattcatcacagaagcctgtgagtacacgaacagcttccttagctttttcccaaagatcagtattattttgaatattgatgctgatcatcttgatttttttaaagatattgacgatatccgccgttccttccgcctttttgcagagaagcttcccgaggacggaactttaattatcaacagcgatatccccaattatacagaaatcacagacggactgccatgcggcatcattacctacggtctggaacaacagggagattacaccgcctctgaaattacctttgacgagtttgcccatccttcttttgactgtctgtaccagggacagaagataggccgctttacccttcaggtaccgggcattcacaacgtatccaatgcactctcagccattgcccttgggaataagctgggtctcactgcagagactatcaaaaaagggctgctgcactttggaggcaccgatcgacgttttcaatataaaggtaaagtaggaggggtaaccgtcattgacgattatgcgcaccatcccacagagatacgcgctaccttgaccaccgcaaagaattatcctcataataccacctggtgcgtcttccagccacacacttacacgcggacaaaagcgctcatggatgaatttgcccatgcgcttacactggcggataaagtcatactgacagatatttatgcggcaagagaaaccgacaaccttggtatatcctccaaaatactccgggataaaatagcagatctggggacagaagtatattatttccccacctttgatgaagtcgaaaactttttattggaaaactgtacccacggagatttgttgataactatgggagccggagatgtgcttaaaatcggggaaaacctgctgggaatctaacttatccacattatccacatgcttatacacattttgtgtgcgaagggcatgtggatttttttgtgcatttccctgttgacataattcgactgcatttttttacaaaataccacaaatcccttgctttttcacctttattggttgtaaataatattttttcttcttttcgttcccacactatccacattatccacattattcttgtggattactcagaaagaggctgtcaaaaaaatgcttgttctcatttaatgataagtgtgatataatcaccgtgaacacgaaaaaaggatgtgtacacttatgcgtcagattaccatacataaccattgtgcacttgagactactgtaatctctaatatttttttggatgactatatgcctcaggccaacggagagtttgtaaaaatatacctacatctgttaagggcaactgccgtacccgatgtggcgattaccctttcttccattgcggatacttttacctgtacggaaaaggatgtaatccgggcactgaattactggaaaaaagccgggatgctggacataaccctggatgaacaaaaaaatcttacggacatcgtatttttgccgctgcaaagccggccggcttcctctgagtccctggctgttcgggaagatatcaccgccccggttgccgccaccgcagaacgtgtgccggcggaaaaaagtccgaaaaaagcaaagcttacctccgacagggagaaaaagctgaaggaaaatgatgaaatcaaacaattattgtttatagcagagcagtatctgggcaaaactctgtctcagacagacgtgtcccgaattttgtatttttatgatgagcttcatttttccgcagacctcattgagtaccttatagaatactgtgtctccaaggggagcgccagtatgcactacgttgaggcggtggcccttgcctgggcaaagaatggtattactaccgtggctatggccaaaaaggaatcctctgcttaccataaagattactataccattttaaaagcatttggaatcaagggccgcaatcccattgaggctgagatccgctatatggatctctggatgaaggattacgggtttaccctggatattatttcccaggcctgccagcgcactgtgcttcagaccaaccaggccagctttccctatgcagacagcatcctcgtcagatggaaaaaacaaggtgtacaccacgtatcggatatcgaggtcctggacacccggcatcagcaggcaaaggccgaaaaggcggtctctgcgcctcaggccaatacccgcaagccggcttccggtaatgcttctaagaataagtttaataatttccaccagcgggactatgacgaagatgaattaagtgcattggaaagacaactattgaaccagtaaagtgaaggagacaaaacgtgtcgctaaagaactcacaatacgatgccattatgcgggaatataaccgcagacagctgcgcaacaagcacatacaggacgaacacattgccgccgcatatactaagattccccgtttggcagaaattgatcaggaaattggagccttaagcctgaaaaaggcgcgactccttctgggggaatccccgggggaggaatttgatctcccctctgccatctcagcgctgtccctggaaaggaaaagtcttctggcggccaatggttttccggcagattatctggatctccattatgactgtcccctatgccaggatacgggatatattgacaacgaaaaatgtacctgttttaaaaaggcatctgtagatctgctgtatacacagtccaatattaaggatatactagaagtagagaattttgatcatttttcctttgattattattccggatcccttgtcaatccggctaccgggcttacctcactggagactgcccatcaggccgtggataaggcatgggacttcattaaccgatttcaaagcagttttgggaatctttttctgtacggggatacaggtgtgggaaagacctatctgtcccactgcatcagcaaagaattgattgatcgggcgtactgtgttatgtacttttcagcctttgatctctttgacctgtttgcgaaaaacacttttaacagaaacagcggttctgaagaggggaatgaatatgtctttgactgcgatctgcttattattgacgatctgggaacagaacttaccaacagttttgtgtcttcccagcttttcttgtgtattaacgagcgcctcatccgcaaaaagtcaacgattatctccacaaatctttccatagaaaatttcctggagacttattcggaacgaaccttttcccggatatccagcaattacactatgattaaacttatcggcaaagatatcagaatacaaaaaaaacttttaggaggaaagtaagaatggcaccgaaagaaaatgcaaatctgaatacccttcccgttggaagactgggtattctgccgctgcaaagctgtacgagcctgggccagaaggtagacaattatctggtacgttggagaaaggagcgccaaaatgagctgaaatctaccatagcgtttgaggggtacgaaagggattcctatattatcgcttcctcaaccccgcgtttcggttccggggaggccaagggcgtcatcaatgaatccatacgcggcgatgacttgtatatcatggtggatgtatgcaactacagcctcacctactctctctgcggatataccaaccgaatgtcaccagacgaccatttccaggatttgaagcgtattattgctgcggtgggcggaaaagcccgaagagtaaatgtcattatgccgttcctgtatgagagccgtcagcaccgccggagcgggcgggaatccctggactgtgccattgccttaaaagaactgctgaacatgggggtggagaatataatcacctttgatgcccatgatcctagagtccagaacgccatacccctgcatggctttgagactgtacgccccacttaccagttcctgaaagggttattccgtgtagaaccggatctccctctggacagcggtcatctgatggtcataagtcccgacgccggaggtacggaaagagccatctatcttgccaatgtgctgggcgtggatatgggtatgttctataaacggcgtgactacgcacatatcgtagacgggcgcaatcccatagtggctcacgagttcctgggggctgatgtaaaaggcaagaatatgattatcattgatgatatgatctcttcaggagacagtatgctggaggtagccgccttgctgaaagaaaaagaggcagggaagatcttcatgtgttccaccttcggacttttcacaaatggcctggaaaagtttgacagagcgtatgagcagggactgtttgacaggctcctcacaacgaatcttgtatatcagacacctgaattgctggaaaaaccatattatgtaaactgtgacatgagcaaatatatcgcactgctgattgataccattaatcacgatgcatccatcagtaagctgctagatccagtggaaagaatccacagattaatgaaccggcattgtcaaagttaaaaaaggggacgtgttctttttaaaaggaacacgtcccaaattcgatccagggtgtccccttttgagtactgccctgtccctttttacaacctgaccatatgatactccagccccagcgcttccagcgcctctatctctctttcctggcaggtaaatatgagtacctgctgtttattctctgacagccatttcagcgtgttacggagcctctggctgtcgtacatgacaaagggttcatccagcagtaccgggagttcttcttctctgcacaggatatccgagactgccattctcagcgcaaagtatacctgttctatagtgcccctgctcagctgctccagagggctaaagtgttcgctggtattcaggtgaatctggaattcatcactgatggatatctgcgtatatctgcctcctgtcagctggcctaatattttcgaggtttgggtcttcaggcggtctccaatctgggtctgcattgccccggaaagttcctgtatggtgtctatagccagctcgatcccttttatctcctcctggagaggagtcatctcccggctgtgcttttctagcagctcctggtattcttccctgagattctcacaggaggtctctttttcttccgcctcttccctaagatgttccagcttccactccagtttcttttcctcttcctgaatatttccttcctcctccggcagattgtgctcctcctgcgggcccggggaactttttttcggatatcggaacagaaaaaagacagtcaccagaccggctgccgcccccgtgactcctcctatcatcccggggatcagaagaaggctcagaagaataaccagggcgcctgccaataggacacctatgctcccgcgatgctctttctgcataacgggaaccttctctcttttatcggctttcctgtctctctgcctcagcctttcccttctcgtcacggcatcactgatcttctcctccagctccgccctttcctcctccagaaataaaagctttcccttaattccgttaagtatctcctcctgctttcccacttcctcttttcttgcctgctcaaaccctcttttcttctctttcagggcagccacagccttttcaatatcaatctgtccttctgtgtcgctttgataattggacatataattgcgtaattcagccatgatcccctctacggtctggttcttcaactgacccacggatacggtattgtcgtataccacctggctgatatttcccagaagaataccgagatctccatcctccaccgacagctgctcgccgtcatcctcgcagataagttcagcccgctggtttgccttgctgaaattcctggtcagacggaaggttttccccccgcaggaaaaccggatgacccccgcgtagtagctgctgttctcccagggttcaaagcggctgtacacatcgtttttggctgcccttcccctcatctttcggatgccaaagaatatcccctggataaatgtgtgaagagtactctttccgctctcattttctccaaaaataatagtgatgccttctccaaagtccagctctttgttatgcagtttaccaaaattttttatccataaatgttctataatcatacataatctccaccggaacttattcttctcccaagagggcacgcagcccatagtataaagccttattctctataattgttctgtccttttccataaagtgcgccacatactcgccaatcagacttccttcgtatttctcacggatggtctgaaaatcataatccggctgggtatcatccagtacttctacaatattccccagtttatacaaatccggcaatacaaattccagatcgggatcccggaatccctccaaaaagatctgaaagatattatcccttccactttcctgtatctcacggcgtatctccgtctccaccgacagctgcgtgtcttcaggatcaactgtaataaacaggggaatgtaggatctgcaggcaaaaggcacaaattgaattgtggttcctgaactgttgcattcccccagaacgtacccgtgttgccccgtatcatttctgtcaagaggttccagcgccccagcataagcacccctgtgccccagaatcttgcccggtttgtgaatatgacccaaagccacatagtcaaaccctgccacctgcagaagttcccggtggattggaatatggcgttcgtctcctccgtgggccagaagtatgttcgtacacccctctgtcctgaccgggcgtatgtgatcgtaaagcggttcccggatttcctggctgtaatagctcaaaccatagatacaggtatccagttcctccaggcagactttcccgcattcttttccccagaggcaataaacattgggattccacggaaatctctgataaaaggaatctttcttgagataatcatggtttcccgccatcaaaataacctttgtatccggtatggtagaaaaaagataattcacctctttcagttctcttttcagaggctgccggtggaataaatccccggcaatgagaagaaggtcggcctctgtgcggccgacctgacaaatgactctctgaaagcttctccatatttctttttctctctcctcactccagggatatcccttatcaggcactgcccccaggtgtacatctgcaatgtgaataaatctcattaaaagtcactcatctcctaagcacaatggcttataactcacaattattaacagttctggggaatggaatcacgtcacggatattgctcataccagtcagatacatcacgcagcgctcaaatcctagtccgaagccagaatgtctggtagaaccgtatttccgcaaatccaggtaaaactcatagtcttccggttttagcccaagctcttccatacgggcggttagcttttcgtaggaatcctctctctggctccctcctataatctccccgattccaggcaccaggcagtccatggcggcaaccgttctgccatccccgttcagtttcatatagaacgccttaatctccttgggataatccgttacaaagacaggacgtttatatacctgttctgtcagatacctctcgtgctctgtctgcagatcacatccccaggatactttatattcaaatttgtcgttaaccttctccagaatctcaattgcctctgtataagtcacgtgggcaaaatctgcatttacgactccctgaaggcgatccagaaggcccttgtccacaaaggaattaaagaacttcatctcctccggcgcctcctccatgacatagcggatgacatatttgagcattgcctcagccagtgccatattgtcctccagatccgcaaacgccatctccggctcaatcatccagaattcggctgcatgccttgtggtattcgaattctctgccctaaatgtaggtccgaaggtataaatattacggaacgcctgtgcgtatgtctccccattcagctggccgctcactgtaaggcttgtctccttattaaagaaatccctggtgtaatccactttgccatcctctgttctcggcagattctccagatccagagtggtgacacggaacatctccccagcgccctcacagtcacttcctgtgatcagtggagtgtgcacatagacaaagcctctctcctggaaaaatttgtggattgcataggcaatcagagagcgcacgcgaaacactgcctgaaatgtattcgtcctggggcgcagatgagaaatggttctcaggtattccagactgtggcgtttcttctggagaggatagtccggcgcggactctccctcaacaaggatttcactggcctgaatctcaaaaggctgctttgcctgaggagtagccacaagagtccctgtaaccaaaatagccgcacctacatttaatttagaaatctgggtaaaattatccatactgtcgctgtatacaatctgcattgtctcaaaaaaacttccgtcatgaagtacaatgaatccgaatgtcttagagtcccttacgcttcgaacccatccgcccagggttacttcccggtccatgtacttatctctgtctttgtaaatatcctttactgttataaggtccatattcttactccttttataatattaaggcggagtaagttctccctggcttactccaccctttagtatatcgcattgcaaattatcacgcaaggactaacataaaaactaccattccaatttcccggtctgctgatactcctgattcatgtcaaaagctgtcaaactgctcccattataaatgtagatagtattgtctatatagagacccctggcatccgtaaaccctccgtagtgatcctcctgattttcatagagaggccagaccaatttattgacaaatccgattccctcctcgtaggaaaacacaccgtaatatgcgttgggatattcccctgaaggagaatatcctccttctgtgtaggcgaacccaaagagattcttttccggatctatcataattgctttatagttagctgcaacactgtactccgaaactgcgtccagaatcattttgctcttctccgtcacattggatggatcgctgatatcaaacatagacagcttcagtcccagttccttgcccgtctcgggatccgcatctctgccaatgccaagaagaagattgtctccgtagtaatgcagatactctgagaatcccgggatcttcagttctcccaaaaccgcaggattctggggatccgacaagtcaacggagaacaggggatctgtgtttctgaaggttacaaaatatcccttatcccccataaaccgcgcagattttatccgttctccctctgccagattctcaatcttccctgtgacctccaacttttgatccaggatatacagcccattggtatccactcccctggcgtcactggcagtgagcaccagccgcagattcccctcatattcgtccagggagaaagaatcattgagatacccattgacagaggctgccgcctcggccttgatctttccctctttatatgcaaatcggacaatggaagttctgtttccgccctgggaccattccggcctggtaatataaatgttggagctgctcacatacatcatatcactcccggcaaccagggccttggtatcctgtactttatcaggcgttcctgtatccactgaggttattacaatataactggatatattctgttccctgggcagataaatgtcctctgccggaagcagctccccgttaaccctggggatatactcctccacagcctccggatcctctgtattatacggcgtataattggtaaagagatatacatactgccccgactttctggaggactggtaatacccctcctgagaaatatgcccagtctgccttaccttcgtccgatcagagatatcatacgtatacaaatgggtagtttgctgttccagggtatcgtaagtattcttctctctttcataaagggcagtctcataatcggatgttatcacacttagcacatccccgtctacatacatctcctgtatcccctcacctgcagcctccagccggatcgtggatgccagtttcatgtccccgcccctggcttccactatctgaagcattccctgccgggtaacaagatagatgtattttccgtctgtcttaacgatatctgcctcatccactcccgcttcccggacattcgtatcagaataagagctgccgtctgcactgtctgcggatgtatccgcaccggctgcctggtcatttgtggcagcgcctgactccggagcagctgcggtatctgcggtagattccgacttttccatagcatcggacgtactgcccccgctgatccagtcggatatagttccaagaattcccctgtcttccttataagtttctgcctggggatactttaccgtatcatagacctgctgataatctgcagctgaagccattaccttttcaacatcctctgcagccgcaatctccccttctgaccctgtatctgccttctcgtcactgctgggagccgaatctgccacagcttgagattctgccgattccatctggttcttcatgtctcccgtctgcgagctgacaaaccatgaaaatactgccaaacctacacacgcggcagctcctgctcctgcagcccagcggcgtatgacatgctttttccgtccctgtgaggaggattccagctttctctctatctgttccggacgtagtccttccgggatctcatctgcctgggccgactgacggattttttccaggaaatccaattcattcatgtcaccttcctcctttctattcatccagatagcgctgcatcttttccagcgcccggcttaactttgagcgtactgtattatggcttttatgtaatatggcaccgatctctttgctctgataaccaccgaaaactttcatggcaactatcagcctctcctcttcccccagccggaaaaaggcctctctgacctgcatattctcatccggatccggagcatgcatttccagagataccgagtctgtcagctcctcccctaattccaccgtcttattcagatattctttcagtcttctcttacacttgttggaaaggatcttaaatatccagccccgaaatgcatctgcatcccggagattatgtattcctgcataggcgtccgtcactgtttcactgaccgcgtcttctgcgtcctggggatttctcaatgtatagagcgccatatgatacatatcctggtaaaccatctcatataaactggcgaaagctttgggatccctttcccttgctttttgggccaattcactgtattctcccatctcctcacctctcatccatggatttcactttcactggtaccctgcttcagcagctggttctgaagttcgaattcatagatacagtgtccttcaaacttccttttgttgcattaaatcctattttatatccaaataacagcaagacccgcatagaaaaggcggtgccgtcgcacctcagctgcttcggcaccgcccttaggcggatctcccgctctatgtccggggacactgcctgtgatgcaaatgttcctcgtatgcagagttttattttaaattctccggattcagtccttccagctccggtactacaaatcttccgtccttgcggatcagcacatcgtcaaaataaatctcgcccccgccatattccggcctctgaatcagtaccatatcccaatggatggaagactcattgccgtttggcgcctcatcgtagcagtttcccggcgtaaaatggatggagccctgtattttctcatcaaacagaatatccttcatgggctccagaatataaggattcaccccgatggcaaactctccgatatatctggctccctcgtccgtgtcaaagacctgattaatccttgtggtatcattggcagcagcctccacgatcttcccatctctgaaggtaagcttcacattttcaaatacaaagccctgatacggagagggtgtattgtaagtgatggtaccgtttacagaatctctcaccggtgctgtatatacctcaccatcggggatattacaggttccgctgcagggaaccgcggggatatccttaatagagaaagtaagatctgtccccggagctaccaggcggacccggtccgtccggttcatatactctaccagcggtttcattgcctcttccattctcgagtaatccagtgtacacacatcgaaatagaagtcctcaaaagcttccctgctggtattggccagctgagccatagaggcattgggataacggagcactacccactttgtatggggcactcgaatctcatggtgaaccggagtggaataatattgttcgtacagcttcatgttctccggcggcacatctgacagctcagatacgttatcactgcctcttactccaatatagcagtccatatttgacatctccagagcatccacctttgccatcagttccatctgttcctttttagcagagagaaggagctctctctgaagacggggatccgtgtaatgtacaaatggaattcccttagcggcatatacctctttcaccagctgtctggccagatccccggtttcctctccaatatagtggatatacaccttttcattctcctgtacccggcaggaatactgtaccagccctctggccagtttttttaatctctcgtccatcgcgtcctcctgttactgattaatctatggattctatataactgataaatacgttgcctgcactctggaacagctcagtgctgtcattcagaccataggggtaggtttcctgggtaaccggattataaagaatcgtgttatatgggtcatatcctatgatcagaaccgattctgtatccgagatcttagctataaccggacgggaagcactcacctcatagagaacactctgcagggaacagccggtgagattaagcacagttccggaactgcccagcccttctgccagagcatctgtatccagctctccggtcttaaatacctccggtatatcccccagttccatagtaacccttgttttcaggtttcctctttcccacacatactgctgcgcacggttcagaacgactccggtttgttcatccgcccttactatggcttcatttggcctggtgaaaatactgtccagctttccttttgcatatacatagtatgcctgaccatcctgtgttttttcaacttccatattgagcgtccggttttcctggctttccatcatctttgaaaccattaccagaggattcttatctctgatactgctgctgaagttcagccgtatctgcattccctgccgctctgtcactttcgcatttacggtgattgccttctcttcctgctgtacattgttcataatatggtcagtgttaatctccacataagctccgtcctgccagttagccctggaaagctcaatcagcccctgctgaagtgttatccccaggatgtacaccccctcctgctggtaattctttaccagggtgccgtcaaagctttcaatcctaacctcattcatagcaaactggatatttccggatgcatctgtgaggatatcggactcattggcaattccgtaaacaagatcctcattgataaatcctaccgctctcagcctggttccctctgccgcggtgatcgtcctggtttcccctgactcaaaatctatctccgtaatctgtgttgtattattagcgtcatttccctccatccaggcagcgtgagcgtttgtcgccgatacatagaacccatccttgggaatcccggatttcagcacctcatattccttactctgtgtatcgaaccggtacagactgccctccagaaggagatacagctgatcctgagtactgatataggatagcttctccagatccttccttaaaaattcataagactgagtggttggaagaaagaatttttcttccagtacattctgatcattgctgtaatgatagacgcctgtccccacgacaccttcatggctgcccctgctcatatacccgtatagcacaaaatccacgtctccagtctcgcctacacggataatcttcatactatgggcagtgctttcatatcggatatccgattccccgtcctctctgaagctgagaattctggtaagcttattggccgtcttattataactccaaagctctccctcctgaacaaaggccacaatatctgcgttctggttagtcacatgctgtacttctttggaggccacgcccagattaatcccatccttagttatcacgggcagatttccgtcaaacacctgcctggcagaacgctcaaagtcaagtagcatcaccctggcctgggtgtaccgcatcctgtaaaaatctgtcacatggtaaagttcctggttcccctcctcatccttggctgagatcatatactcaatggaaatgctcccggttgtctcattaatgtcctttatggtagggattcctttccggaacagctgaggctccagtttcccccagctcaccatgtcattggtagacttaatatttacctccgtatagctttgactattcatagagctgtctgtctccaggtatttggtcaactctgaccgggaactcttatccagacacagctggtaaaatgtttccgcaaattccagatatttgtctgtattcagccccgccctctgtatcagcctggtataataatacaccgtctccttatcggtctccacggcaaacctcagggaatattcctggttcatccggatgggctgctgtatggcaaaagtagctttctgcgtattttcctcttttgagaatgattttatctttgcattttctaccaccttacttccgtctgaggtacgtacctcgtaggctacgctctttatcttatggccgcagggggtgattgccagcgtaatctctttatccgtatctatgggtgtcagactgtcccgcataaagtctacctgcatctcctgcttatatcccagcagctgattcagctcattgccgtcgatttccatcgacagcaccggcagactggcagcctccaaatctgtcttattatccgttgtctgtttgttcattctgctgcttatcaccagcacggcaattacaaacaaagcagccaaaatgccaatcttagttagaattcgcttcatcttcggcctcctctcctgcacacagcaaatgctccagagtgggcctggcatggaagaattccatacattcccggtattggttccccggtttaactcccttagaactctttaccgcccgaatcagcaggttcttgggggtatgctccatatctataaattccagtatctgggtgtcatagccctggctctcaagaatcttggccctgagtccgtcggtgagaatcgcagcaaatcgttccttcaaaatcccataggaaaagactggttccagtatttcattggatatctggccgtttagctcatgctgacagcagggaaccgacagaatcacagaggcatcccatgctaccgcttttgccaaagcgtaatccgtggcagtatcgcaggcatgcagggtcacaaccatatccacccggccggtacctttgtaggaagcaatatccccctggagaaactggagtttctcatacccatattttctggccagaccgctgcaggtctctatcacatcagctttaagatccaggcctataatctttacatcataccctcttaattccttcaggtaatgatacatggcaaaggtcagataagattttccgcaaccaaaatccaggactgtaatctctctctccctgtcaagtttcggaaggacatcttcaatgaattccaggaaacggttcagctgcttaaatttatcgtatttgggtttgagtatccttccctcctggttcataactcccagatctattaaaaacggtacagggattccttcctgtagaagatatttctttttgcggttatgctccagagaaacctcctgtttgcagcaggatccctgcatttccttcacctggatcgtcattttcccctttttgctcaccagtacgcttccccgggcgctgccgccctccatctgaagctgccgaaactgcccttccatcttctgctgtacatagggaataagctcttccttcctataattatggtgcagctccttttgtcccagagtctcagacacctggtacttcagctcacctttcaacataaccggacgtatcttaatcttacgaatcccttctttattccttgggccgctgattgtcatctgatgcagcccctgctctacatatctatttaaaaattctattaaatctgtcatataataatctccatctgcgagagtttgtcctattgtcacttcagaagaaccgtgagaaaaactcacggctcattcatgatattattgtaaaggttttaaagataaaccacaagacctaatattcctaaaaataacgtctgcatctgcgtcttctgcagcgtcttctgtacacttcattaaagaataaaacctgtaccagttccctcagcgcccgatctgaaatctcctgggtctgcattttttcagccatatctttttcgattttttttatcttctcctggtcatatcccggatcccctgtcatttcctcttccggatcctccccaggcattttatcttcctcatacgttttattttcttcatatatattatcttccccgggtgccttctccctttccagctctcttctcagccgttccggaagctctataggtattaccttctcttcttccttttgtatcttttccaattccatcatttccaatcgagcattttcctcttttacctggctgtagatgtgatcacacatttgattcatcataaaccggtctgggtattcatcgtatatcatacttccttcatattctatcttatcacaggcgtcttccacgaatttctgtaccatagctgcattctttgggtaataggatttcattttttccacctcttgttccagcatccattcctggtcatacatatcagcatacggataagtcatataaaatggtaatggtttttcgtaatacactgttttccccttaaaaaataattatattttactatatatagtatagtccctgggaatactttgtgctataattgggctgggagaaatttatattatttatttcatgtatatgaaatttttttgggaggatgaaaatgaatgaactaaagagcaaggacttctggaaggaccagctgatcatcaccatcggcgtgttcctttacgtagttccgtacaacctcataaccactccaatgcatttatacagtggttatctcacgggtattgcgcagattgcgaggacactcttatcagattacgcacacattaagatgaccttcgactggacaggtattatcctgtatttgatcaatatacccttgtttgttctggcgtttaaaacgctgggaagaacttttttctacaagacaataattaatgttacggtgatgacaatctttttctccatcatcccggtatctgcagaacccttagtcagtgatcccatggcaggctgtctggtagccggtgtcgtcagcggattcgggggcggtattatcctccgttacggcggttcctgcggcggtatggatattgtaggtatgtatgccactaagaaaaatcccaatttcagcgtgggcaaaatcaccatgatgatggctgctgttatctttacgatatgcgccttcctttataatattgaaaccgttattttttcagcaatttttaccattatttgctcccttgctctggacaaaacacatttccagaatatcaaaatgtccgcaacaatcttcaccaagaatattgatgtggggcccattatcacccatgacctgggccggggtgccaacacctggcggggagaaggtacatatacacaccaggatacttacgtatttatgacgatcatttctaaatatgagatgggtcagctgaagcggaaggtacgggaaattgatcccaaagcctttatcgtattccagcaggtgactgaggtatccggcaattacgagtctcggttgtaaaaccgataaactgcggggtaaaaattacctgtgcctaaacttatcagcagggtaaagacgtgaccctaaaattaaatatagagcttttgcagatgggatctgcaagggtaaatgacatcctcattggagtcaatgttttaaaacattgaagactccggtggggatgtttttttgtcgttcaagttcacgttccgcctccttatgtgcaggtattcctattgttgtctgaaaaaataaaaaatctagtcatttaacgaaatttgcatttacagaaaatgcttttctgcaaaatgaatctgaccgaaagtacgtgtttggttaattttaggcgaatacataagaagccgattataattattgcataaaggactgtaaaagaatcgaaggggggcgatgcgggtgctgataatatggcatatgagttattactcactccaggaatcatgtacagccagctgagggctgaatccaaaccccgtttatttgacggtactacttaaaagaggagggtaaaatgaataacgaagtaaatattgttttagatccaaagaaaaagaggctggtaatcctcgcctccatcattatgtatttcaattacatgtttgccaacatgggctgcggcctgactcttcccaggctcttaggcggacttaatgctatggatatttacgccactgtactggtgttcagctctgtaggccttatgattgcctccccggtgtcgggaaaacttggtgataccttgggccgtaaatggatcaccatcttttctttggccggcttcctcatatgtgcagcaattacaggtatgtccccgaacggctggatgctcatggtattctgggcgctcaccggaatctgcggcggcttctttgtctccgcctctttttccatgattgcagacgttactaccattgaggaaaggcccaaatacattggctatctggcaacggctgcggcagtaggacagcttgccggccctcttctggccggggttctggctgacaacggtttggtacggggaccgttttttgtgggtatcccccttggtatcgtggtcatctgcctctatgcttcctgctatccacatgttaagctgggagttgtctctgaaaataataaaattgatatcttggggcttttccttctggtagtcagcatctgctccattgtatttttcctgaactttggaaatgttattttcccaagaacctctcctataggtatcgctcttctgatcataggaatagtgggcttcatcgcgctgatcatttttgaatataatgcaaagaacccggtagtctccgtaaggctttttaaatacaaagagttccgcattgcctggatttgtcattttctatataccatgtacatagtagtggtaagcggttatcttgttctgttcgggcagaatgtcatgaaggtgtcagtgaccgtaagctccacctttgccatgccccagaccatttgcagtgccgtgcttgcttcctttgtaggattgtacatttctaagagtgctaagaactacaagaaaatttatatcttcatgggactttgcggagccataccgcttctcgcatgggcctttttcctgacgcccagctcatcggttatccttatttatattacgaccctgataggcggtgccggatacgcctgtgaccaggtagtgaacaccccctaccttcagtccaccatgccaaaagaaaattatggggctgctcagggcatgctgatttttgccggttctgccgcaggcactgtatgcggcgctgtgtcgggtgtaattctgaaccgcgatgcaccactggaagagtctcttggcttgatctttctgatcttcggtatctgcctgttccttatctttattattggcctgacatccgtgaggacacgtgcagaagtgaaggaataaagtttccggcagttacaaatccggactttaacagcctatgaatgggccatgattcatgatataattcttatatatcaaaatgaatcatggcccattttaggaggtagcttatggatacggctaagaaagagtttataaaaaaacagtttctggttggggtaggtgccatcatctttgtactcccctacaacctgcttatcacccccatgcatttatacagcggcaacttcaccggtatcgcccagatcctccggactctgctggtagattatgctcatgtggccctgcccagggggtttgacattactggtatcatcttatttcttataaatattcccctgctcactctggcgttcctcaagctgggcaagtttttctttgtgaaaacagtaatcaccactgccctgatctccctgttcttttccctgatcccggtacccccggaacccattatcagcgatcccctgaccgcctgtctcatcggaggtgttgtggcaggcttcggcgcaggcatgatcctccgggaaggaagctccggcggcggactcgatatcctgggcatgtattttgcccaaaaaagaccaaatttcagcgttggcaaggtagtagtcatcgtggcaatctttgtatttacaacctgtctgtttctctatgacttcgaagtggtagtatattccgccatctttaccttcaccagctcctttgccctggatcggtttcattatcagaccgtaaaggtaagcgcattcattgtaacctccaacccggaagtagcacaggtcataacccaggatctcagccgcggcggcaccgaatggaccgggcagggagtatacagccatacaaaaatgcatgtttatatgaccgtactctccaaatatgaggtcaataaactaagacggaaggttcatgcgctggatccccattcctttattgcctttcagacagtgtcagcaatagaagggtattttcagccgcatctgtaaaaatgatgggttttgtgtatgtgaagttcgaggtaaattagtcggcgagcggacggttaagggagtgatggcgcagacggacggatatagaagggagcaccggggagacagggccagggcgtaggaaaaggtcagctcgaggctccgctcccctaagctaagccctaccagctgctaagctcgtcaggagagccctcctcgctaatcagctggtggactggatcttcggctcactccgcttaacctccctgaccttttcctacgccctggccctgtctccccggtgctcccttctatatcctggctgagactcccttcacattcacggaaaacgggtagggaaggtcgtgagttgtacactttacaccttgttatcatttttgttagctcaatgtctctggtgaacctgccccttggaactttcccatacccaggtgagaggaattctgcggcggcgggctggaagagctgggggagggagggctggggtccgcggacgattccgcaggagtgaatagagagtcttaggcaaaaccgggattcccgcaggagattttttcggcagtccgggccgaaaaaaagtgagcatgggcagagaatgcacatcaagcattctttggccatacgaacggtgctccggcggggattccggttttgccttagactctcttcgcgacggaggtgtccccggaccccagccctccctcccccagctcttccagcccgccgccgcagaattcctctcaccgtcccccagccaccccataccttccgactagaagctctaaagcatcggaagtcaaactctaaattgacattaaaaaaggatccgccgctctttcaagcagcagatcccctatccaacaaagccaaaggtattctatcaataccctctctctttgtaatgatgcgcctcttccagcatcatatcctttaccttcatcagacgaatctgagtacttctctcattctcatccaacttcatggtaatatacttaatattctttctggtctccggaatgattacatgttccagagcatttactctacggcgggttttttcaatctcagccgccatcagctgacaagccttttcacattctgcaagccgtaacatatcgggcagtatgtctgccagagacttcactgcgtcgtccagatcccctgaggtaaaggcaaagccgtaagaatagatgtcgttgtcatcggctgtcctggtcttatattcaaagaccgggacatcaacgctcatgacatttttctttgagccttccagatacacctcttgtttgggagccatcagagccgtatttaagatctcctcagacatacctgctcttgcaatgacaaagttcttatttgcggaaaggatgccggcttctactttttggcgcaaggccatattttccctaaccaaatccatgaactgacgcattaactcatcacgcttatctttcaaaagcttatggcctttggtagcggtgacaagctttttctttaacttggtcagctccatacgggttggattcacctgggtagatgccacacaatcacctctttcttagtagttcctgaaacattagaatttaccgtagtactcatctaagaacttgtcatcaatacgtttcagttcgcttctcggcagaatggagagcaatttccagccgatacggagagtttcctcaatatcccggttggacatatacccctgtgatacgtattcttcctcaaatgcatcagcaaacttggcatagataaggtccatgtcagagagggcagcctcacccagaattaccataagctctttggcatccttgcctcgggcatacgcagcaaacagctgattcatggtgtttgcatgatcggcacgtgtctttccttcaccgatacctttatccttcagacgtgacagcgaggggagtacgtcgataggcggcgtaatgccttttctgtataattcacggcttaagataatctgtccctctgtgatgtatcctgttaagtcagggatgggatgtgtcttatcatcttcaggcatggagagaatcggtatcatagtgatacttccgttctttcctttctgtctccctgctctttcatataatgaggcaaggtcagtgtacatgtatcccggatatccacggcgccccggaacctctttacgggctgcggaaacctcacggagagcgtccgcatagtttgtgatatctgtcaggataaccaaaacatgcatatctttttcaaatgctaaatattctgcggcggtaagggccatacggggagtcgcgatacgctctaccgcagggtcatttgccagattaataaagagaacggtacggtcaatagcacctgtctccttaaaactctcaatgaagaagttggattcctcaaaggtgatacccatggctgcaaatacaacggcgaactgttctcctgaccctcgaaccttagcctgtctggctatctgagccgccagattggcatggggaagacccgatgctgagaagataggcagcttctggccacgaaccagggtattcagaccgtcaatggcagaaacacctgtctggataaactcttcgggatagcttctggccgcgggattcatgggcagaccgttgatatcccttctctcatccggcagaatttcaggtccgtcatcaatcgggcgtcccagaccgtcaaatacacggcccagcatatcgccggatacccccagttccatgcttcgtcccaaaaatcttactttactgttagacaggttgatacctgtagaactctcaaacagctgaaccagcgcattgcttccatcaatttccagtactttgcagcggcgtgtttctccgctggctaattcgatctcacctaactcatcgaagtgtacattctctacaccctgcaccagcatcagaggacctgcaacttcttgtatggttctatactcttttggcattagaagtcctccttccctaatacattagcgatctctgtaaccagttcatcgctgattttcttatattcttcctccagattattctccagagtgtatttgaaacgtccgattttttcacgtacctccatgctgataagcttctgcacggatgcacccttttccagggcatctactgactgctcatagaatgcaattaccagattcatcatcaggtactgttttctcagggatgtgtacgtatcaacctcatggaaggagttctgatgcaggaagtcttcacggatagatcttgccgcttccattttcagacggtcagagggtgacagagcatccatacctaccatcttaacaatttcttccagttccgcctcatcctgaagaagtcccatcagtttctgacggttgctcatccagtcagccgctacttcctcgttaaaccagtgctccatattatccacatacagagaatagctggtcagccagttaatggccgggaagtgacgctttgcggccagagatgcatccagtccccagaataccttaacaatacgcagagttgcctgagatacaggttcggagatatcacctccgggaggcgatacagcgccgataacagacagtgcgccttctctctgatccttccccagagagattacatgtccggctctctcgtagaactgagccagacggcttcccaagtatgccggataaccttcttcaccgggcatttcctccagacgtcctgacatctcacggagagcctcggcccagcgggaggtggagtcagccataagagctacggaatatcccatatcacggaaatactcagcgatggtaatacctgtatagatggaagcctcacgggcagcaacaggcatatcagaagtattggcaatcaaaacggttctctccatcagagactgccccgtcttagggtctttcagttcagggaactcgttcagaacgtctgtcatctcatttccacgctcaccgcacccgatataaactacgatgtcagcctccgcccattttgccagctgatgctgaatcactgtcttaccgcttccgaatggaccgggaacggcagctacaccgccttttgcaatggggaagaaggtatccaccacacgctgtccggttaccagaggcatctccggaggaagctttttcagataggggcggcccttacgaaccggccatttctgcatcatagtaagctctttgtctccgtcagcagtctcgatggtggcaaccacctcttctaccgtaaattcacccgcttttatatcttttactttaccttttattccatagggaaccatgattttctgtgttacaacaatggtttcctgaactgttcccagcacatctccggcttcaacctcatcccctggttttgcaactggaacaaatgtccactttttatctctcttcagggaagcaacctcaacaccacgctttaagctgtttcctgaaatcttcataatatcatccaatggacgctggataccatcatagatactggcaatgagtccaggacctaattcaacagacatgggaacctccatagactccaccggttctcccggtcctaagcctgaagtttcctcatatacctgaatagatgcctgatctccgtgcatctcgatgatctccccgatcagacgctgattactaacacgaaccacgtcatacatgttcgcatctctcataccctcggcaataaccagcggccctgctacttttttaatcgtacctctactcattgggacgaatcacccacctttctaattattactgaacagaatatcggaaccaacggcctgttctacagatttcttcacgttctcaatgccttctcccgtgttcccgttcactccgggaataaggatgattgcaggcattacctggtcctgatacttttctatttcctgtctaatctcagccgcaagtacctctgtaatatagatgattccatatccgttgcctgccaactggttcaatttttctccggcttccttaggggctgttactggaaatgtatcaagtcccaaggttgcaaagccgtagatactgtcatagtcgcctactactgcaatcttatacatacatttcccttaccctttctcggatagaatccacaggtaaatcattctgttttcctgtgagaacgattcgcaccgtcttaatctcattttctctcgcgatggcataggcgaaaataggtcctacggaatcggagttatatttctgaggcttaatggtctcaatgatacggttatcacaccagcgctcaaaggcggaggttgactcctccagagcctttgcccctgcggcatatacggtgccggaaaggtattcctggatcgcttccatactgctgcccgcagcacgaatcagatcattcacactgatggtactgcagtctgccatcgcccgtttcataaattctgctgttttcgcggttttctgcgcacgtacggcaatcttaatgtctgctaccgctaccacagattcggcataatcccggataatatcatcctctgctgccttccctgccgcatagatagcatccaatgccgctttatccacaattacatcgcataactgtccgtctctggtatggagaagggtgtcatatgcatcctgcgccgctctcaccatactctggggcaaacgcccaaaatctttttcccggatgatttccatcatctgttccccggaaatcgggctgtcctcataaaagatatgtgcgttagtctctgacgtgcacacctccttaatggccgctttcaggttgtgaaagaggttcggataaaaaagcacgtcaaacatggacatatccggagcaagctccctgaccgtctcccaggctttttccctttccctggacagtatcgattctgcgtctctgggtgtgtcatcatctccccatcccttttccagcaaaaagtcaagacactcctcataggtagtgcaggccagaagctgctcgatggtggatgcggaaaacagatgcacctccaacgcacgtgttcgcgcaaccgcataggtaaaatctatatcagacatgtataatcctcctttttacggttctgcgcttatacaaataatacttcatgtactttatctgaaagtctgtctctctccgcatcaaagatggctttgaaagtacagttctcttcgattccgccataagcaagtacaaacccgccttctatcctcttgccttccttagaaagggtcaacttgccgccttttgcttttgcgacagcatcaatatctctcttaaagctttccggcattttttccagatcggcagatgaaaaataaatctctccttcctggggcaggacatatttttccagcatctttttcagcatgccaaaatattctgcctcatccatagacttaagcatctcgaatgctctatccagaacttcagatatcatctcctgttttgcttccagtactgcggtcctctttttcaggtcacaggaagattttaccctgtccttatagttagcgatatctgcttcagactttttggagatacgctcagctgttttttctgcttcctctctggctgcagccagaatctcttcagctttcgcgttagcatctttgattttttcgtcggcggaggtttttgcttcttccagaatctggtttttcattttttctaatccagtcattctcaagctctccttttacttagtttgtaacgaaataaattaaacctgaatagcacttactacaaggatcgtaatcagcagagccaggatggcatatgtctcaaccatggccgggaaaagcattgctttaccgaactgctcaggtttcttagcaacaacgccgatagctccggcggctgcttttccctgatatttaccggaaacaagaccaacgataccgattggcagacaggcagccagaatcagcagtccggtctgtacagatacttcagccatagatccgcctaataaaccaattttagataatacgataaatccaaccagcagaccatagataccctgtgtaccgggcagaagctgcagaatcagaactttggcaaatttacttggatcttccgaaataactccggctgccgcctgacctgcaataccaactcccatggatgatcccgcacctgcaagaaatactgctgctgccgcacccagtaatgcataaacaattcctatatactcgctcatagataagtttcctccttaatatcaacatattttgtatctgagtgaaatggttcaaattcttttccgccccctgagtagaacttaccgaagaattctacaaactgcagacggtttgtgtgcacataggcacccagcatgttaatagccatactgaaaatgtgtccgaagataaatacaattatgaataatattgctccgaatacactctttccgcccatgcttcccatctggtttactacggaagcgatgactccggttgcaaggcccagtgccagcagacgggagtaggacaatacgtcgcttaaccagcccgtaatattgtataaatcataggccccaagtcccagtctcagggcaaagttcttggaagaacgcccggacatgaacagaataccgattgcgccgataattgccaataccttaccaagcatattcactgcagccgggaataccagctgtgttccgatgatagacgcaaagattgcacttgggatcagcatgatcaaaagtcctgctaacaggaacacccaaagtaccacatcacagaagaaatccaggtatgccttgtctctgagaagcatataccctttgattcccagtccggtaaacaggtgaattaaaccaaagatcattgcgaaaatcaataacttcatgggatcattgaggggaacgaaccaaagggcaggtatcacaacatccttctcaaagaacacccttgcaattaccgttaccacatctccaaagtagcctccgaataatacgccccagactatggtagaaataccgcagtacataaacaggctcagattcttatacatacctctggacatgcgcggatatttcttcagcaatacaaaacataccactgagataattaaaccgtacgcagcatcggataacatcattccaaaaaagataatataaaatatagacattattcccgtgggatcaacatctcccttggcaggcagcccgtaagaatccagaacgccctctactgcctgtgatactttattatttttgagaagaacaggtgcttcctcatcctccttcacgtcctcaacgtccagagtacagtcaaatcgttcaccaatttccttctcaagagccggaacaacctttgccggcacaaagcctccaagcaggaatgtctttttagactgcggcagagtacccagtacctcgtatttttcagcccttacccggaaatagtcggatacctggcggaattcacttctcgctgccgcatattcggcaatttttgcctcagtttcgcttatttctttattcagtttttcaattttctcttccagtttctgcttatatacactaggtatatctcttgactttacggataatctggcaaatccacctgtccgcagggcattttctacttcctgcgcctcactcttcaggcagattgctgcaatgtaggcgacatccttatcagcggaaactacggaaacatctacggcatcaacttccggcgcctgttctgccaaaacggcatagacctgctccagggtcaaagcccctgaaatggtgcctattaaaacagccgtcctggaggttccgtcaaaattcatgggaatatccagaggcagccacggcgttattgcctcaatctggttttccagcttcaaaatcgtagatcgtttctccgcgatctctttattcatagagaccagctttcctgccttttccaggatctttcccttgtcttccagcagtttctcgtaggattccctgtcaatcagagccttaccttcaagactggataacatggacttcttttccggcacataaaggtctaacacatccagagcctgatccgcaacctgagctctcttatcaaaaaccgccctggagctggctgtattcagcttttccagaccttcttcatcctccagtacaggggtgatctccataatccccatggactgaatcttttccagaatcgccttccggtcttttttcagcgcgcagatacttactttttgcatctgcataattgccatatccgcatccctcctttacttttaacttttcgaacatgcctgcgtcagattagctgtgtaacaatcatcttcgcaacatcttcttttttcttcttggccaggtttttcaactgttcaatatcctgatccaccctcttggaagcttctgcggcaaattgatcaccttctgctttggcgtcttcctttaatttgtccgctttccgattagcttccttctctcgttccacttttaaagctagtgcgtcctctcttgccttttcgagaatctgtgcgcactgttgttcggcgtcctttactatctgttctgcctggacttccgtttccttaatcgctttaatcgtttcttctaccaccatatcaccacctttacaataacttaatactactatgaaatagacatattgtcaatttattatcatactttttcgtcagatcctctaagatagaatgcccacttattgatttttttataaaaaaaagggaaactgtacaaatagaaacagtttccttttttaacctttggtaataatagttattcatacaaataattagcaaaatcatctgattccagattgttaacatcaatccactggaaacctgagctaatgtaagtgtcgtttgtcataccggcctcagctcttgcggcagctacaatcgtagcataccccataccataaggattctgaacaatcattccggtttctcttccgtccttaatggcctctatctgtgctttccctgagtcaaaccccactaccttaacctgaacttcctcccgatccttcagcgccgacagcaactcttccgtcatagtgccgttggtacaaaaataacctgtcagatccggatgagcttcaagtactgcgctcaccatctctgtcacagattcctcttcgctctcgtaggaagtgcttacaacagtaatcccctggtgattggctatctcctcacggaatcctttctcccgatccatactgctttctgagctgctgttatgcgccataaccgctacttttccggactcgcccactgcctcagccagtcttctggccgcctcagcccctgcctggtagttatctgtggagcaaacggtctgtaccaaatcactgtttaccccggagtccagtacaacaacgggaattccgttctcagctgcagtctcaagctgggcctgacaggaattcatatccacggctgcgatacaaagaacacttgggttctctgacagaaccgcatcaatgatattaatctgagattccacatcggattcatcggaagggccctcaaaggtcagacggattttatcctcccctttatatccgagttccttgttcaatgccttcacagcagcctccatgcccttgcgtactttagaccagtattcgcttttgggctgctttactacaactgcaatgtgtccgcctttttccagaggaatattctccacagaggtataactgatttcaccgctgctgcctttgactgaagtcattgtcaggtccttcgtgtaatcatcttcctctgtaaccgtctcctcctggttatcttcttgttctataggttcagtgccttcctcgccggcgtcctggggctggttggtaactacctgatccttcggcagttctccggcctctacgttcttgctctggccgcagccagagagcaggttcaccgacagtatcatgcataataatgctactgcgattcttttcattcttattctccccttaatataatcctgaaaaattcgttacagtctcattatacacgatacttttgcgaagtccatatgcatttgtaacatttttgtaaaagaatttaggaaatttttattaaatttttcttaagcttaacaaatcccactcttttatgattccccatatcagaagtgctgacactggtccgaggagaaatcccagccctccatagagatataccccaagataaatagtgagtaaaacaaaaatcggataaatcccaaggctttctcccaccagtttaggctcaaggaactgtctggccaaactggtcacaaggtaaagcgccagtaaacccgctcccactgccgtgtttccctgaaaaaacgcaagaacagaccatgggattaaaactgtccctgtaccgatgagaggcagtgcatccagcagaccaagtcctatcccccagagaataaagtgtttaacatgaagcaggtaaaatcctcccaggcatagcaaaccgataattcccatgattcttagctgggcaagaatatacttttttgcttttgaccacagttctatgcatacattgtgtattctgacatagagtgaatatccctgcagcttctccctgaactcatccagatctcttaaaaataatatggacgacagtacactgagaaatgcacccccgaaaaaaacaatgcacttttttactgaatccacggcctgtccccagaattcaagccctccgctctgcaggaaagcctcctctgctgctgtcatctgcttcaccacaaagccttggctgtcctcagataaaattcctgttattttttccaggtgatcgcagcagttcgcaagaaaatagttcatctcatcttttaaatcgggaaggcaggacagccagcccggaacccgattggcacaagtttccatagcctcccacagcaaaaaaattgccagacctgcaaaaagcagaatcaccactccgccggctctctcccttgtaagatgtacttttttgcttacggtgagcctgcttaatttttctccaattgggtaaactataagggccagaatccagccaataaaaaaaggactcaaaacaggaaaaaggtatttcatgaagagataaactcctgttgcgactccaatgataatactcgtattcttccatttcataagcaccacacacctttgtcagcagtgtattttttatctgctgattttagtatgtgccgccccacaccagctatactgtagaaactttgccagagcttccagctattttaaagaataaaaccctcaccctttggtatcacagtaaactccattggttttcctgtttttgggtggaaaaaacaaagtctgctggagcatagcgcagggaaggttgttctcttgtcctccataagattgatattatactttttgtctcccagcagcggacatcctatgttggccatctgcactctaatctggtgatgccttcccgtcttaagtttaattctgaccagcgcttttccctccttagtttccagaacttcatattccagtactgcgtgcttactgccagatgttttttcaggcacaacacgagatacattattccttccgtccttcaccagctcattttccaaaattcccgctttttccggtggaattcccacggtaacagccaaatattcctttcccatccttccctgggtcagctgcctgttcaattctctggcagcatggggagtcttagcaaacaccataacaccttccactggctggtccagccgatgtaccaccgcaagatacggcggcttccccgaacctaactttttcgacagataattcttaatcaaactctccatatccataatcccaaccttagctgtctgtaccgccacacccggacatttgtagcataccaggagatactcatcttcaaataaaatactttcttctatattatatagactcatatttttgatattttttcctttcctttttgcagatatgtaaaatatcagctgatttttatcatagcttgttgagggggtgatgtaaagtaaattatagttttgtgtaattgttttgtgtatgtaaagttcgagataaaatagtcggccagcgcagcgttgcagacggacggatataggagggagcaccagggggacagggccaggccaggggccggggtatagggacaagtcagctcgaggctccgttcccctcagctaagtcctaccagctgctaaactcgtcaggaaagccttcctcgttaatcagctggtggactggatcttcggctcactccgcttaacctccctgacttgtccctataccccggcccctggcctggccctgtccccctggtgctccctcctatatcctggcagagactcacttcacattcacggaaaacgggtggggaaggtcgaacgttgtacacttttcatattattcatcatttatgatcgctcgatttttggataaacatccaaccctgttaccgttatcacttccatactttctggctacattacagctatattctatctaacaattttacagtcatatcctatgtgaataatatcattccccttctgataaatttaccctctggaacttccctatacccaggtgagaggaattctgcggcagcgggctggctggttcgggcgggagggaggcttaagttccagggacgattccggaggagtgactagagagtcttaggcaaaaccgggattcacgctggagattttttcggcagtcagggccgaaaaaaagtgagcatgggcagagaatgcacatcaagcattctttgcacatacgaacggggctccggcggggattccggttttgtcttagactctcttcgcgacggaggtgtcaccggaacttaagcctccctcccgtacgaaccagccagcccgctgccgcgggatttctctcaccgtccccctgccacccacacctgccgtcttgtatgcctctgagccgatgtccaaattaccgaaccaccttgacaacttttcccaaatattgcatacttgaatttgcaccatattccaccaaaggagatcttaatatgctaatgtacctatggcttatcgttggttttgtatttttaattaaaggggccgactttttcgtagaaggctcctccagcgttgccaagcttttaaaaatacctactataataataggactcactatcgttgctttcgggacaagtatgccggaggcatctgtgagtattaccgctgccatggctggaaagaatgagctttcgctcagcaacgtaatcggctctaacatctttaaccttcttgtggtagcaggagccagtgccgtactgcggcccattcacgtggagaattctgttttgaaaaaggactttcctttttctatatttataacccttgttcttcttattatgtgtattcccagcaagtttcacagcagtaaaatttctgttttgactcagacagaaggagtactcctgcttttgctttttgcattttatctctactggaccgttcgccatgccctgagggcccgccattggatggctgaggattccgaacccaggatcctgtctcccctctggacaatactgtatattatactgggactggctggcatcatctggggaggcaatcttgtggtagacagtgctaccgccattgcccaggcatttggactcagcgagacctttatcggcctgacgattgtggctctgggtacatcccttccggagctggttacctctgttgttgctgcccgcaaaggggaaagtgacattgccatgggcaatgtcattgggtctaatatatttaatctgcttttagtacttggggcttcctgcactctccatcctgtagctgtcaacctgttttccgtgtatgacattattattctgatggctgtaagtattttcacatacatttttgcccttcacaagagaaccttgagcaaaaaagaaggagcacttatgctccctatgtacctggcctttttctgttttatttcatttcggtagatgctaaagttgaacaaattcgaacaaccgccatatcctcttattttcagatacaacggttgttctaatgttcttctttattcaattttctactttccttttctttttagtctatgaataagttcctttgatattaattagttactatcaacagttacactatagttactaattatctatatcaattcacatttcgtgtttccctgctataaatcactgggatttattgaaagttttgtatcatttatctatacgagctaattcgatataaataggataatataaagtttctaatttataaatcacgtgttataaatcttccaaatgcttatttatataatttcattcgatataggaacttgttaccaaatggatatcaacctcttcttttattataccttcatttattatataaacatcacatttttttaaaatatatttcttcacatatattttaaaacctttatactatttttgtggtaattattcaatatgaggactctttgatacgttacctgatatgcttttcctactacaatatcttttatgaggatttctcttttttcttcctatataccaggtctttctacagggaattaagccttaccactctcatattgattattagattcattcgttcccaatggactaatcctcctttactatttctattcaaatattactttttttcctccacatcctttcctgatttctttttcttttgttcttatcttgtactctcaatacacataaagttcaaagtactttgaaatcctttagatgctttgtttcatctttctaagaagatttatcttctctggttagaaaatgaatatgaagtaatattttctctttagttgtttgtatctctcttgtttatgtatttataatagcagagagggttgtatttgtcaatatactttttaaaaaagtttatgtttttttataatgatatttttaatattttttgcacagtttattttctaaattttcatgaattgtacttgcaattttgacaagttaattatattcagacaaagaaagaccggatgagtgctttcgctctccccggccattttctctcagtatgttccgcggttatcctctgcggttatagttaatcagacatcccttcaggataatctctctctcatcatcggtaagctcacctaatgtaagggtgaaaggggttaatttctctcctaccgcatatgcggtaatctcggaatccttgttctctacagctgatttgatgcccggcaccagaatataactgccgttggcaaagggcagttctccttgctggatcaggaaaggcagcattccccagttaatcaggttagagcgatatctctttgtggcatattcgttggcaatgttcgcccatccgcccagcaccttctggcaggaggccgcttgttctctggccgatccgtcaccaggctttacggcaaaaatagtacttcccacaccaatatttccttttcctatctcaggatactgagcctggatggtctccataactggtttcagctccggcagagcttccagcggacaggtaccggcctcaacagccttctgtgctttctgtacttccttggctcttcccacgtaagcaggatcctttctggagagggtgaactcagccagtcccagaggattggaacggtaggatgaggtctcgccggaaggaataagttcgtctgttgttgtaacaggatcgtgaatctcagatacaacctttaaaatcagattctctgccagaggagacatttcaggccagtctttgatatttggaccaaactgaatctccacattgggatctgccactcctttgctgtcaaatacccggttgtcataaattgctttatcaaaatggtactggggttttctgtagctgcctgcgtattcggtagctgctgtgagatatcccttattcgccgctgtggcagctatggaacgggcgtccataagtgcaacggaggaaatctgtccattctggatcttagaaccctctctgttggggaagtttctggtggaatggcggatactgaaagcgttgttggcaggcgtatcgccggctccgaagcagggtccgcagaatgccgttttcacaatagcaccggtctcaattaaggtcgccagggtgccgtttttggcaagctccatatagattggcgtgctggcagggtatacacttaaggtaaaggcatctgccccaatgctggcgcctttgagaatatccgcggcatcacagatgttctcgaagcctccgcctgcacagcctgcgatgatgccctgttctacatacagtctgccgtcttttaccttatcttttaaggtaaacggcacctttcggtccagacttacctgagctttcttctccacatcatccagaatatccataagattggcattgagttcatcaatggtataggtattgctcgggtggaagggcatagcaatcataggacggatcttgctcaaatccacgtaaaccatgccgtcgtaatacgccaccgcgcccggcgccagctccctgtactcctccggtctcttgtggatctcatagaattctttgatcgcatcatctgtcttccagatagaagagaggcatgtagtctctgttgtcataacatcaacgccgattctgaaatctgcactgagcttttcaaccccggggcctacaaactccattactttattctttacatatccgttggcaaatacagcgccgataatagccagagccacatcctgaggacctacgcccgggatgggttcccctgtaagatatacgcccacaaccccaggcatattaatgtcataggtctgtcccagaagctgctttaccaattccgggccgccttcgcccatagccatggttccaagggcgccgtagcgggtatggctgtcagagcccaggatcatctttccccctccggccagcatctcacgggcaaactggtgaataacggcctggtgcggaggtacgtaaacgcccccatatttctttgcacaggtcagaccaaacatgtgatcgtcctcgttgattgttcctcccactgcacacagagaattgtgacagtttgtcagcacataaggtacaggaaacttttccagccctgaagccctggcggtctggatgatacctacaaaggtaatatcgtgagaagtcagcttatcaaatttgacggtaagcttctccatattgccggaggtattatgctcctttaaaatcccgtaggcaatggtattcctggctgcttcttcttttgtcggcgcctgtccgcccagcttgctttttaaggcggtctgcccatggctggtatccggaatgatctcagttccgtttaccagataagcacctgtgtcgtataattgtatcatgctgcttgtcctcctgatttttctttattttctaagcattttataccttactgtgcggtgtgcgccctgggtgtcagctttgcacccggcagtaccgtagatcagactcaggcctgctgtaaggtatgctgtgaaaaacaatgttcaaacgattacccctgattcttcaggaactccatatagctggctaccattaaggcgatcttaaaggtcagagcgtcctcaaatactctcacatccagcccggtactcttctgaatcttttccagacggtacaccagtgtatttctgtgcaggaacagctggcgggatgtctcggagatgttcagactgttgtcgaaaaacttgttaatggtaatcagagtctcgtcatccaggcattccggcagcttgcccccgaacacctctttgataaacatctcacacagaggcagaggcagctggtaaatcagccgaccgatcccaagattgttataccctataattgttttctccgcataaaatatctttcctacatccagagccatcttggcctctttgtaagatcgggagacatctctaatctcatgcacaatattgccgtaggctacccgtacctgagacatggcctctgcattgagcatgtctacgatcatgtgagagactttttccacgctttcataggaatcactttcctccagctcccggacgagtattatgttcttctcgtcgattgcagttataaagtcattcactctgcccaggaaaagatttttcagggtttccatcgcgctctgatccttttcgtacttagtctctatgatgagcacgactctcttagcctccactgctatgtgcagctttttggctctgttatatacatccactaacaataaattatccagaatcaggttctggatgaaattagatttatcgaatctttctttataagcaataatcagattctgaatactgcttacggctacccggcctatcatataggcatcgtcgctgctgcctctggcaactaatacatattcaaccatctggttatcgtatatcttaaaaaaatgatatccctgtatgacctggctgtctgccattgattccacaaactcgtggacatctactgctgccatgtcatcatccgggaacgtagcggccacagtctttccatccacatccattacacacagatcaatccttgtgatcgctctcaattcctccagagtcttttgaattacttgacttgatatcatggaatcccatcctttcggtaattagacttttatagctaataatatatatcattttgcgcaattgcgcaagaataaaccgccgcactgcgtaacgcaagtgcggcggcctacacggcatctgttattaattggtaataaccagctctgtttctttatcaaaaatatgaactttttccatatccagtgcaaatttaacggtatcacccgttctcgctgtggtacggggatccactctggctgtcatggggaagccctcaacatcaaagtataagtatacttctgcacccagaagctcatacactttaatggtagactcaaccacactgttgggtgacatctcaataaagctctcggaatcatgtacattctcaggacggatacccataacaacggtctttccgtcatatccgccgtcaatgactgcttttgccttagaagcaggcagtttcacagttgtgtttccaaccttgacggatgcttcctttccattcacggatactactccgtccatgaagttcatctgcggagagccgataaatccggcaacaaacaagttgcatggcgcattatataaattctgaggggtatctacctgctgtaccacaccgtctttcattacaacgattctggtacccagggtcatagcctctgtctggtcatgggttacatagataatggttgcgcctaatctttcgtgaagcttggaaatctcaatacgcatctgcactctcagtttggcgtccaggtttgataaaggctcatccataaggaatactttaggctcacgcacaatggcacgtcccatagcaacacgctgtctctggcctccggaaagagcttttggcttacgatccaacagtttctccagatccaaaattcttgcggcttccttcaccatcttgtcaatctgatctttgggaacttttctgagcttcagtccaaatgccatgttatcgtaaactgtcatatgaggatacagagcatagttctggaataccattgcaatatccctgtcttttggctctacatcattcactaccttatcccctatcttcagcgtaccgcctgagatctcttccagaccggcgatcatacgaagggtagtggacttaccgcatcctgaagggcctacaaagatgataaattctttatcttcaatctccagattaaagtcttttaccgcctcgaatccgttgggatatgtcttgttgatatgttgtaaggataaacttgccattttaaactcctcctagctttcggttcgttgtattcattaactgtacctagtataacactatgttccgaattcataccatggttcaaatacacaaagattcccgcttgtccttgtcaagattacggttggattgtcactttaacgaattccatataaaatactgtacaatttacacaataccgctgtcactgccgataaccgtgccttccaggttctccctgagaacctggaagcctacggtaaccttaaaaagatctccgtccaggtaaatgtcaaaggtacctccctgaagctctgtcaggcttctggcaatggacagccccaggccgctgccttcagtacttctggatatgtctccccgtataaacctctctgtcagttcactggcctgtatattcagggactgctgagagatgttttttacactgcagtatacccatcccattttgatgcctacatccacatacacccgggtatcctccagggcgtatttgcccacattgctgaacagattctctatcacccggaagagtctccgaccgtccgccatgataattgtgggttccttggtgatattcatgaccagctccaggccccgttcctgaaacttctctataaattccccgctgatctggttcagcagttctttaaagtccagccttgtgcactccagctccacattgcctgtgctgattctggatgcctccaccaaatcctccgtcagctgtttcagcctctgggatttggtgtccagaatatctatataattctttacttttggatcctctattttctcccgtttcagaagccccacgtagttaacgatggaggtgagaggtgtcttaatatcgtgggacacattcgtgataagctctgtcttcagacgttcattttttatactctggcttactgcttcctgcagtccgcttccaatatcgttaaccgcttcagcaatctctctgttcaccccccgaatttctttcgcagggagctgataatctgactcgccctctgcaatcttccgtacccccgccagaaccttctgctgctccgccgcctctctgagcatataatagcaggcatagatgttccagagaatgcataaaatgattcccgcggtgccgaacagaagcagaactatatttaccaaaagatagatgaaaaaggtcagaagcacccggtttcgtatctttctttttttctggagcctgcccagggtacctatcaggtatttgcaggcactgttctcccagagaattcttccctttccccttctcacaaagcttaacagctcagtaatcagcagcgcggacacgaggaatgctgctgctgccgtaattcctatagtaatctccggactcagatctgctatccaaaccatccccagccccgctgcgccggcccctccggttataagaaagaggagaaggagcacttctgtcttcatgctgtcaatcggatagagcactacccggtcttcccccggaatcctcccggtaagggcacagaggatgcagaagcccagaagtataatcaggccggataccagcatattccagaaggaagcacgtacccacgggccccatttgtcaaagatttctttcccctcccggagcctgtcattggcagagaaagaggtatctacactaatccttaccgtatagacgcagttccccatcagatcatgccccatctccctgatgagtacatttctctgcttatctgaaaacttaaaattcgtgtcaagctcatagctgcctgtcttaaaataaatatagtatttgccgttttccagatcttcttctatattctctgtatttttatatacgctgcctgtatttaagtttgtcacctggtacttcagattgcattccccggactcaaaggtattcttaagggtggcatatctggtaatatctctgtcaatccgctttaacactccagccagatagaccctccactgatctccgctcatatgccgtatgtttttatctgactccgccatctcattgatcccatcaaacccaatgggggcaaaccgttcgataaactctccggctccttctgtattcagcgtgccgtcctcctgctggacgtcattgagccattttgtataggatgtgtcaatttctacccaggtatggagatctcccagacggtacgccagcccgttaaccacgtccccggaaaccagcccgttattggcataatcatagatatcaatgattttctctgcatcatagaccccgtctgtctcaaaattttccttaagcttaatatattctgccagggagcctgtcatcctgctcacatcagtaataaactgtgaagtctgagtataatccttagccttataattatcccagccgtcctccttccatgcctgccctaccacactgatggatatggcaatgcttaaaactacaacctccacgcataccaaaaggcccaagaacagatttaatctgggaatacgctttaaactctccatatcctttccttcctgctacagcttttcaaccttatacccaattccccaaaccaccttcaggtagcggggttctttgggattaatctctatcttctcacggatatgacggatgtgtacagcaactgtattatccgcaccgattgcttcctcattccatatattttcatagatctgctcaatggagaatacttttccgcagtttttcaaaagaaacagcagaatattatactctataggcgtcagctttaccacctcgtcatccacggtcacctctttcaagtcatcattcacggacagacctcctgactggtatacattagtgctttccccgtggagtgtgcccagctttgtatacctgcgcagctgggatttgactctggccaccagctccagaggattaaagggcttgctcacgtaatcatctgcccctatattaagtcccaatatcttatcggaatcctccgactttgctgagagtataataatggggattccgctggtctccctgattttaagggtggcacggattccgtccagcctcggcatcataacatccataatgagaaggtgcacttcttccctccccaggacctccagcgcctgctccccgtcataggcctttaataccctgtacccttcctgggtaagataaatctctattgcctctacaatttccttatcatcatcacaaactaaaacctgaaacattgtttttcaccctccttttcttctttcgtataacctcttattcccggcaatcttgtcttaggcgtacggcacagaccgtcccccgcactaagggcatacagctaaggataccccagggcattttatacatacactgttagcctaacataaatgttgataattttccactggataatttgcaagaatgctttactttccacgaaatggaatctataatattttctatataaacttacacgatcacaattcaattgtatgggagaaaaagtatgaagaggaaattattggcagcctttgcggctgttcttagcgtaactattggtctcaccgcctgcagtcagggtactgaaaccccagagaaggggtctgatgctccggtgtctctcaccatctggcattattacaatggactccagcagtcccagtttgagacaatggtaagtgactttaacagtactgtgggagcagaaaagggaatagttgtggaggccttcagccagggatccatcaatgaactggaagaaaagcttttggcttccgccaacaaggaggtaggtgcggaagaacttccggatatcttcgcgtcatatgcggacaatgcttacaccctggatgagatgggccttgttgcggatctctctccgtattttactgaggaagaactgtcccagtaccgggaagaatatattgatgagggacgttttacttcagataccttaaaaatctttcctgtagccaagtctacggagcttttattcctggataagactgactgggataaatttgccgatgccaccggcgcccagctgtcttctctctccactatggacggtttactctccacggctgaggagtactataactggacagacagtctcacggaagaccctgatgacggaaaagccttttttgggtgggactctctggccaattatatgctgataggagcccgccagatgggctgtacaatttttgatgtacaggatggaaaggtttctctgcatctggatgagaatattatgcgcacactttgggactcttattatgtcccctatgtgaaaggttactttactgccaacggccggttccgctctgatgatatgaagacaggggatctcatcgcctatgtgggttctacctccagcgcttcttactttccggacgagattacagtaagcgatacagaatcttaccctattgaatgcaagatcctggaggtcccgcagttttcagggggagactccgtatgcgtgcagcagggcgccggaatggtagttgccaaagccgatgagaagcaggaacgggccgccacagaatttttaaaatggtttacagatacagaacgtaacatggaattttccgccaccagcggctatctgccggtaaaagcggaggcatacagctcagaaaccgccgtccccggcaagggggaggacatgaaccctaaaattgaacagtccattgaggtatccttccagcagctgtcccatatgacctcttacacaaacaggccttttgcaaatggcacaaaagcaagatataccttagaagattccatcaaagaaaaggctgctgctgattatactgccattcaggatttggtggcctccggtacatccagggaggaagcagtcagccagtttactacagacgataattttaatacatggctgaagggactgtcagacagtctgaaccagcttacaaagtaaaagactttaaggcaggaataactcatgaaaaaagaaaaccatcccggaactatactgcataagattataattcccgttgctctggttctaatgctccaggcctgtttgctgtgcggtatcttatactggggcggtcccctggaggagtccaataaaaacgcctttaatgtgatggaaagccgtaccaccggaagggccaatattttggagaacaatatggtgcagaattggtccaacctggccaaatgccagcaggccctggccggctgtgcggaagatgtggccagctccaggaatatcagttacgaggatcttgggacagatacagaagccatctcagattttctgtgcagtgcctctcagcccatgatcgacaccctccggcagaatggtgttaccgggatctatgtgatcttaaatggttccggcaatcagccggatacggcagaaaaagccgggttatacctccgggactataaccccaacgccggttctctggataacacggatctctttattgaaaaggctcccgtatctgtgtgcaaatatctggggattcccctggatatcaactggggatctcatttttccctgacagagaattctacttactactataatcccctgcatgcatataccagcaatccctccctgggcactgtcaacgcagggtactgggacgggcccgtacaggtcacggagaatgacatcagtatactcacctactcccagcctcttcttgcctccgacaatacctgttacggagtacttggagtcagcatatccctggattacctccgggaaatgctcccctccgccgaattaagctcgggcaattccgccagctaccttctggtccagaagctgagcacagattcagccgatccaaggtataagatcatattgtccagcggttcctcctcaaagtattacctgggggatgcagaagagatcgctttttcctccaaagctgtatacggaaatatctatcccctgaaaaacagcaaggatttccctaaggacgagaccatttacggcaacataacacctctgaagctgtataatacaaatacacccttcgtgaatcagtccttgtacctgattgggatctcggaaaaggatcatatcctcagctttgccgcttggctgaagcacaattgttttcttctgatactggtatctctggctgtagggatttcttccgcctttcttatcagttaccggatctcgacgcccattatccgtctgtacagaaaagtaaaaaccagcagcccctacaccccggttcagctggataagatacagattaaggagattgaccagctggtatcttccattgaagaattaagcgcctctgtggccgagcaggcttccagggtttccaagatactggatatggcctctgtgcctatcgctgccttcgaatataaatggggagagcccaccgcgttctgctctaagaacttttttcagatgatcggacagggtgaagctcagccggataactttaccatctccgctaaagattttaaggtatttatggaggacctccgggagtatatgcagtcttactccaacacagagggattcggcatctaccggctcagggatgaacagggacatctccactggttccgtatgcgcattctggagactaaggaagccattacaggggtaattacggatattaccctcgaaatggctgaaaaacaccgcctggaatatgaaagggattatgatatccttaccggtcttcccaaccggagagctttcctctccgccatgacggatctcttctccaggccggaagtattaaagtacgctgcattgattatgattgatctggataacctaaagtatatcaacgacacctacgggcatgactggggcgacgaatacttgaagtgcgccgccgttgtctttaaaaaccttgcagataaatcagctgtcacagcacgcatctccggggatgagtttaacgtcttcttttatgggtatgacacaaaagaacacctggaggatgccatcaccgacatgagatgcctgctcttagacgcccatctgaccgtgccggacggcacccagtttaagctgagggcatccgccggaatcgcttggtatccggaaaacagcacagttctggacgaactcatcaaattcgctgattttgccatgtatcaggtgaagcactcagacaagggaaacatccaggccttcgacatgtccagctataaaaaagaatcctaccttctcagcggcaaggaagatctccatcagctgattgagcagaggctgattgattatgccttccagcctattgtagaggttgcaagcggaaaggttctgggatatgaagcgcttatgcgtccccaggtgccctccctcaaaagccctgtggatgtattaaccatcgcccagtctcagtccatgcttcagcccatagaagctttaacctggatgacggcgccggacatttactttaacaggcacatgaagggcagtacagattgtcccctgcttttcattaactccatccccaaccagcggctgtccgattcagaggcaaacgaactggtcaagaggttcggcagttatatggatcacataatcctggagcttacagagattgcccagctgagtcccctctgtctggctcacaaaaaacaactctgccatcagtatcatatgagaatcgcactggatgactttggtgcagggcataacagtgagggcgttcttctctcccttatgcctgaatatgtaaaactggacattgaacttattcacaacattgacacggataaaaacaggctggacttcctggagaatctgattatatactttaagtctaaaaatattaaaattattgcagaaggtgtggagacaaaagaggagcttgaggtcctggctctctgcggggtagactatatccagggatttttcttcggaaggccgcagatggtaccagttccccctcttccggaagccgtagagacactggctgacatccggaattcccacccgtttagagaacagcggcatgacagcggcagataaaggagaatttacatgtttcgattaatgggtacactttataaaaattctaagatactaaaagatacggtcatctgcgacgagacagggaaccggcgcacacagaaggtttttaacagcctggaagcgatctgctattcctttgacctggaaaagcccatctggctggaatcgaatctttccgactttaagcagcacagcaaaacccgcttctatcaggataattttattgaggatgttgactttgattatttggagatacgggtgattgaggaggattagaaatttaaaaagcgctgccgtacaggcctttgcctatacagcagcgcttttgtgagctcttattttggaatattactatgtcctatcagttagattataatctcttcatcaattcttctctttctttctcatagcccggtttgccaagaagtgcgaacatgtttgccttatagctctccacgcctggctggttaaatggattcacgcctaagagatatccacttacaccgattgcgaactcgaagaagtagaataattgtcctaagcagtaagcgctctgctccggaatttttaccataagattggcggttccgccgtctgtgtgggctaatacggtgccgttcatggcgcttttattgacaaagtcaatggtcttccccgcaagatagtttaaaccgtccagatctactggttcctccttaatttccatgtcagccttcggactttccactgccaacacagtttcaaataaaatcctgggaccgtcctggatgcactgtccaagagagtgaaggtctgtggtcaggtctacactggaagggaagatgcctctctgatcttttccctcgctctccccggccagctgtttccaccattcggaaatataatgaaggcttggctcatagttagccataatttcaactgttttaccttttctaagcatgatgtttcggagggcagcatactgaagcgcatcgttttcttcaaacggcaggttcaatgcgcgctctctctgttctgcagctccatccatcattgctttaatatctacaccgctggctgcgataggaagcagtcctactgcggtcataacggaaaaacgtcctccgatatcatcaggtactacaaatgtctcgtagccctcttctgaggcaaggctctttaaagcgccttttgccttgtctgtggtagcgtagattctcttcgctgcctcttccttaccatacttcttttccagcatttccttaaatacccggaacgcaatcgccggctctgttgtcgttccggatttggaaataacattaacggaaaaatctctatctccaattacatctatgatccccttcatataggaagcactgatgcaattaccaacataatatatttcgggagtcttacgaatctctttggacaaattattatagaatgggtggtttaaaaactcatttgccgctctcgcgcccaggtaggaaccgccgataccgattaccagcagtacatctgagtcttcctgaatcttggcagccgcttttccgatgcggtcgaactcttccttgtcataagtaacgggcaggtcgatccatcctaagaaatcatttccaagacctgtccgtgacagcagcatgtcctttgctgcatctgccaatttccccataacagctacttcgctttcactgactacaccagctgttttagaatagtcaaaggttatcttatttcccatattcgtttgtctccttatgttttttccaagtttatcctcggttttttccatttaagtttagcaaaatgttatacatttatcaagttagaaattctttaatcacatcccttactattttttcttcctccttgctcagaaggtgtccatatttgttattggtggcagcgctctcctggatacctctggccagctgctccatcacttcctgagatggaagttcctttgcctccccggcagcgggcttatcagcgggctgggagattacttttccttttttcagtttggaagccttcccggtcacaggaagatttcttcctgtcttccctgcctgggtctgtgaggcagcctttgaggtttccataggtactactttgttggtttctatatgttcgttttccaggtaatcaagaagtccgtcttctatcaattcctcctggtaggaaaatgccagcagctggcggaatatgataagtgcagctatcatacctcccgcggcaatcagcgtccccggcctgctccagggattggcgggagtccactgcccgcttctgtaggcttgtaccagatccagacccgcaaagagaatagaaaagacgaaagcgtaccacatggttcccttgagtctgtgcagggatattggccctatctttcgtccgttcatccgtttcttaataaagataacaggattgtttatctgtgagtgttcttttagtaactggtggtagtcctgacaaaactgctgcatccatttccctttgggatatggaagacgggatacatcctttattgtttttttataggatatatacaccattaacaagctgacagctcctaatactcctgcacaccagataccgtaataaaataaattcacaatgattcccccttttgcaatttgcagattttgtacggttccattataggtcacccggggggatttggaaagcaaaatcggtcgacaaattctctggtttcttgcggcaacagaatgcgacaaaaggcgctttacagcctgcctaccatattttctaccagccgtacactgtgtactatggcctgcttctcaaaagctccgtaatccatggtagcactgttgtctgccttatcagagatcgcccggaagatcacaaaagggatcttattcagataagcggcctgggcaattgcagccccttccatctccgtgcagcagccctggaagttctctgtgagaaatttctttttctcattgtctgagatgaactgatcgccgctcacgattcttccgggtattgcctgaatatccggattgacttccctgcatgcggcaagccctgcttcagccagtgctttgtctgccggaaaagccagggtgtccatcctgggaatctggcccagtggataactaaaaacagacgcgtccacatcatgctggagcgcgtctgttgagattaccatatctcctatattcagatccttgtctaaagctcctgcaattcccgtattcatcacagcctccacctgaaaatcatcggccaggatctgtgtacacagcgccgcgtttactttcccgatcccggaacgcaccactactacatcctttccgtttagttttccctgatggaactccatttgggcctttacagttacctttgtatccgtcatcttttctttcagggcagctacctcttcctccatagccccgataataccaatatggttcatctgcattctcctttttacactgattcttttggtctgtctttaacgatctgcattattatagcagattctaaccagttgtaccaggggagaatactccattacatagaaaagggcgtcagccggattgctccgcaatcattccgtttgtctcagcgcggcctggaatatcttgtccagctctgtcttcttccagtcctccaggacatattccacgggctgcccctgaatctcccggtaaatctcttgtaagctgtccttggctgttttttgtccatccagcatccatctttgcatgttatccttgggagaaaacagagatgcatccagatattctctgtactcatccagggaacggtcactgcatacaaaccctgaagagagtccttcttccatttcttccagaagggtatcctccacttcatcctccggaatgccgtccagaatcttctgtgcaaaggtaatcgcctccagatcctggatcagctgcaggggatcaaagagctcatccagactctgggtacccacacagtagaatctccgggcgccgtccagagccccggccataatcatcatgcctttttccatagcggtccttccgtcaggctcctttccccaggtatggatattggtgctggaataatccggttcttcccctctgatataggcagtcagctctgcggccgcctgctcgtagagaaatttttcaggggtaccgaaggcaatgttaaagtacttaaagtcaaagggaaatagatttggtcttatctctccctgcaggcccgtgagcagttctactaataccgcgcctcctgccgcctcggccaggacaaccgccaggcccatagacaggttcatgggtgtggtaactcccatattcggcatggaaaatgtataaaaagaattcagccgggagctgtatttacgcacaatgtcaaaggcatcccctcccagggtcagagggcttatcatgtataccggaagatgggtcatttcctggcccattaccccggtcatctcaaacatatattccgccgcctctacagaatccggagctgccggccagcacccggagcaatgttctgctgcaatctgatacctggccagggaggacagctgtgccggtacatccgtagggtagcctgggatcaccggattcagggggtatctcctgtgtgccttttccacaaaggctgcatattcacccagcttttcccggccgaattccaggatccggccggcatccggatcgcggtaatgataggtatacagactggcctccccgtgcagcctgcttccgtgtttgtcaggggggatcttcttcccttgttgacggaggagaaattccctgtatgccgtttcccggatcagggccctgtctccccgcaccacaattccttccttatgcttcagctcctcaagggcctggggatctgtcactttaatccctgtatgtgccagaatccttcctgcgccttctataatatgctccgccctctgaggggagagatgtcttcccttccgtaatctcatgctttttctccctttttatagtctcccactatcttggagagatagcggaacccgtctacatccagtccttttttgtctgcaacccgctctgccagaagctggagggggatcagcagggctgccggcgacaggcactcttccctgcattttgccacaggtatcacaaactccagcgggatacatccgtctattggcgtatctgtaacaagggaaactgtaaccccggcattttgcaggtattctccgtgttccagcgcagtccgggtatactcctccccggaggcaaggagaactgcgggcagtccctcttcaatcacctcaacggttccgtgccggaagtccgaaacgctggacccggaggtatggataaaggtcttttccttcatcatcagggctccttctatggctgtggctgcatttgcccccattcccagcagatagagattcatgcaggggatcagggcatctgccaggcgctccagagcctcagggcagagcttcagagtgctgcggataatatccggaatttcaagaaatgcccccttaagctccggccggtaaccggctgctatgatggataagatcagaaatgatgccatatttgtctttgtggcggagcttatctcccgcccgctgtgaagaagcataacctctgaggcattctctgccagacttgacttgggatcattagtgattccccagaatgggatccctcgttctttcagttcttttcccacaacctttgtctcatagctttccccggactgggagataaagataacaagagtgtccttgtcaattgacggcagcagataacacagttcatccgactggataatctggggcttcaggctgcagtactttagaaatgcatacctggccatatggcacgcatagagagatgcgcctatgcctgtaagcaccagctgcttttttccctgaagcaagtctctgaaatattcccctttcggcaggtatgcgtccaggatcttctgcgccacctccggctgatcctggatttcctgccacattgctgtatgtttcattttctcctcctttatccctttacagagcctgtggtcagacccttggttaaatatttctgaaaacaaatgtataataggatggacggtatcattactatattaagtcctgcaaacaaggttacccaatctgccttcagcttaaaggattccatcagggcaataattcctaccggaagagtgaggagttccttatcatgtataaaggtgagggcaaatatatagtcgttccatatccaaacaaagttaaagatgatgatcgttataatcccattcttagacagggggaagataatcttccagaaggtggagtgaaccccgcacccgtcgatagctgccgcttcctccagctctctgggcatgctccggtaaaatccgctcatgaccaggatagagtagggaaggctgaacaccacataaaggagccccagcccaagatgggtattccacagattcagtttatacagcaccgtgaattctgatggcagcaccagggctgtagggacataaagccctgctataaaaagcatcagcaccacttcgctccatcttttctcactgcgcaccaaaatgtaggctacggtagaggacagaaccaccaccacaagtacagagactatggtaatcagaatactgttcagggcatagctctgaaaatctatcttaacccaggcattgctgtagttttccagctgccacttctgaggcagggcccagggatttgccacaaattctttgttggtcttaaaagaggtatagaatacccagaatacagggaacagtacaatcagcccgtatccccctgccagcaggtcccgcagaacccccagcggtcttattttctttttgttattcatccctgcaccccgctttcgtcagtctcataattgcaaatataataagaaacagtatgccgaagagcagcacgccgatggtggaagcgtacccgtaatcgctgtaggtaaatgcattttcatacaggtatgtggtcagaagctctgatgcacggttgggtccgccctttgtcattacatatacaagctcgaaagagtaattaaaggccgtaacgcagaagaataccagtgaagtgcggatctcctgccagatgcccgggatggttatgtggacgaactgctgccatgcactggccccgtcgatagaagccgcctcgtatctgtcgtctggtatatttaagatggccgcaatgaacataatcatatagaatccaatgttaatccacacaaggggaacggtaagcgcacccataattacgttggtctcgcccagccatacgtgctgcagctttgaaaggccaatctttccaaggaatccgttgaccaggccaaaggatgggttatagataaacatccacaatacagaaaccactgcaatagacattacgtaggggataaagtagataatgcgcagcccctgatggtattttgatttctttctggtaaccataaccgcaaatgccagggcaatggaaaaggtaaatatggtgcagaagattaggatgaacacattatttcccaaggccttccacacaatgggatcctccaggaggcgtttaaagttggcaagccccacaaatttaatgttctctgaaaaccctgaccagctgcacaagctgagaaacagagatttcacgcagggataaaggcaaaatatcccgtagagcagcaatgtgggtaccagatatgtgattaaaaagctttttttctttcctaccatgtcattcacctgccctttccagttttgtgtacccctgcataaattcatagagccggtatacatccgggctctcgcctgtgcggacataatagcccgatgtggcattgccaagcctcaggctctccgccaggggcagcccctgcagcagcccaaagcacagacccgcgttaaagttatccccgcccccggttgacagtttgggaacaggggtgtaatacccctcttcctttaccatgattcccttggtatagccgtaggcacagtggggaagatggaggatgaggtaatcgatgctaagcctgcggcttatctcctgccccatttctcttctgctttttccctctctgtggaataaggccttatagatcaggcgggcctcattttcattcatgctgaacaccgttgtcctgtattctgcaaatgcttctcccaggcgcaggatctggaccagttcctccccggactttctggatgcatccgagagatccaggagaagccatttgtttttctctttttttcctccttttatacagttgtcataaaccgcctgaaacaatgctgtagcctcggccagctcactccagttgagaagggcgatcaggcggctgtccctgaaatatcctatgagttcttctctgttcatcctgccggttatcatatcccaggtcatttcctttaggttatccattgaagaaagcataaccttgccgtcatgaaactccagggcattgcactgcccggttctgcacacggaatggagcatgcagttgtcattcatattcttaaataccggatcaatcttaggataccccatactgccgatacaatgtgtctttaccccaagggtgccaaggctgttggcaaatatggccatattgcccccgattttctcctgctgaagctccagttcaatggaacagctcatgttcttctttgatatcagataactgccaaattcctcaatggtttcaaagtatgtaccgggcagctgtccgcttttttgttttaccgcacgcaccacatgatccacgactacatcaaaaccggcagcagcagtaatgctgctgccggacttcatggcacgttctaatacctctaatatttttatattatttgccaccgcttgtctcctgtgctactttatccattctctcgcagaattcttctgcatttatttcctcctggattaaagcattgatgcagttattcagttccccgagcacctctttgtatctcactttataagaaggagatataatgcttacattgtcatctgccatcttccacatggtctgtgcgctctttggaagcagttccattacctcgtcagactgttcttccatagccagcagaaagcctgtcttttcagccacatatttggcattttcttcagaataaaataattttacaagttctttgatatattccagcttgccgtcatcctcctgcttcggaagaaccatacattctacaacagctgtggttgaagtcttgccggcttcctcgcctggcgcatacataggctgcaggtcaaagtcgtccggccactgatcctccatctctccttccagccagcttcctgagggaacaaaggcgtcgttgtttccgatgaaatcaatctgagactggatgtggtccatggccagcgagttcttatctatatagcctgcatccctcatctcctgaaggcgggtaaccgcttccaaagctgcgggctgtttccaggcacctgcctcgttgtcgttaatagcttccattgttttcggatccagattttgaatcatgggtaccagaaaggcatctgccagcataaaggggtatacacctgcataaatcataggggtaacaccgctgtcctttatggttttgcacagcgtctggtattcctcccaggtagacggtactgtccagttattgtccgcaaagagcttgccgctgtaaaagttgcccgcgatcagcttgctggtgggaaggaaatagtgggatccgtccacctcacccagagcaagtcctgcggagaaaatggtttcctccatggtcttagtgccctctgcattctgctctgccagtatgtcgtctacgggatataacagcccttctttggcaaacccataatagtccacatcactgatccaggtgtagaagatatccggagcctctttgacattgagaagattgcggattacctctgccgccttggcgttactctcaaattccacatttacattaggatatttctccttaaacttctccagaggcagatcccagaactgctcagacacctcctgctgccagaggatggaaatggtgacgtcctcatcctctttgctgtctccctttgcctctgttttcgtgtcctcttttgcgctgtccttactgcctccgcagcctgccatcgagaataccagtgtgcctgcgcataacatagctacaaatttcttaaacatagtttcctcccataatttttcctgtttcggaaccatcctttggttctgttgattaatagtttattcccccgcaggcggcttacgcctccagggtaccacttcggtttccgcggtatgtaccgaaatggtataaatctgtccggctgtatcccccctggcttccggtcagaatttattctgtttatatcataaagccgtaccttcctccgcccgccggttaaaggggcatccactgggaaaataccatctctgcagccccgcacaaaaccgtggcgctgcagtctgcatccatctttacttcggggagtacgtttccctgcaccagaagtctggatgtaacctgttccatactcttttctaaaacttcccggatcagtcccaccgtttcccctcctatgtaaatacagtcggggttaaagatattgtttaagatagagagaagccttcccaaaatggcggcattctcctctaatacctgaactgccgtgccttcctttttttcccagagttccaggaattcctcataagaagtaattttcctgctgccatagaggttgtatttctccacataccccataatgcgcagatcgctttccacacagcccatgctggagcacagatgacactgcatctgcatattgccgatgggcatatgacaaatctccggggcatacccgccgctgccgcagattaacttgccattggcaactacgccgattccaagaccttcatccgcaaaaagataaacgatattgtcctgacttctatagatattttccctcatgtactcagacatgacacagagattagactcgttgtcaatataaactgtcttccccaaggtctttgacagcatctctttcatgggctgattattaaacagctcgatctctgaagacacaatgttatgggtttttttctcaaagattccgggaacagcaactcctacccctacaatctgatcctctgaaaaacgcttgagcacctgttctctgtatatacttccgcaggtctgtactacctccaggatgctgcttttttggctgtagtcaaatctgtcgtcatagaccacacgggtgctgtaatccgccacagccacacggataaccccaaacctggtcaaatcaaagcacagagacatgaggttgttatagttcagggagattcccttgggagttctgcccaccaccttagtatcctccagggccgtctcctccagatatcccttttctctcatctcattgcatatattagaaactgtggcgaagctgagacccagctcctcagccattacctttttggtacagcttttatttctctttaaataattaataatctcttttgcgtgaacctttttcagttcaacggaactgtcaaccttcatcctctgtctcacccctcctattattttataaattattttaataattattttaatcgctttaataattgtatagtagatcagatatcggaatttgtcaagagtagaatttgggacgtgttccttttagaaagaacacgtcccaaattcgaccaggggtgtcccattttcagacagccctgtcccttttttcacttaacggtccagcacaactttcacggaccccatcccgcagtttatgtcaaagaagttctctgcctgaaggttggacttatatgtccctcccatgcctccaaagcgatcgtctcccactctgacatctcccatgcctaccttaactctatacccgtagtccgaaggaacggtcaggctggcagctatctcacccatcccgcagtccagcttgcacttgcctgtaaggcgcccttccagtaaaaccttacccattccacagtttatttttgccggcccgctgtaataatctgccagtacaacctcaccggcccccagatccaaacggcttgtttcggcaagaattccccggcctaccagcttgcctgcacctaatttgattttaacatcccggaaccgatagccttttggtataataatgactatcttccgctctgagaaaagattggtaatgttgttcagcacaaacaggcccttatagcctttatcctttattttccagacaccgtcctttacttcctccctgcagtctccgtcaggatagccggataagtccagcgcgaactcatccccctcccgaacaatggcttctgccatagaaatatcaatgtgaagagagtgaatggtcacatgattctcatggattaccttttccagctccagcttctggagcggcacatcctcctccggcgggatatcttcccccgcagcacagttctggtgttcttccccgttcggttctgccccagaggcatccggtgcttcttcccgcaggggcgtctcctctgcagcttccgcggtatccccaccggacagctggccgcctcccagcaaaacatctgtacttatgccaaagatgtctgccagaggaaccagcatcataatatccgggcaggaaagcccgctttcccacttactgacagcctgcgcagagattcctaactgctccgccagctgagcctgagtcagcccctttaacttccgtaaaaatgcaatcctgtccccaaaggcttcagggagtcgtttgtttgctccattcatatttgtattatcttccatcctttaacccacctatctatcttattttcttttcattaagttacggttcttatgttttactgtcatgtgtatctggctaaacggcgcgtcgctctcttaagatagttacagcatatccgttcttcaccggtatttacaagcaactgtaggttgatttttactttttctttatttttcaaccaatagttgatttattgctgcctgtccattatagcaaaagatctttcctgcggaaagagagatggaaatctttttctgtatctgctataatagctcctagtatggaatcatatcattatatataggaggattaaagtatggtatataagacaaaaggaacctgttccagggccattgagcttgaattagacggagatattgtaaaatcagtcaacttcgtaggcggatgcaatggaaatactaagggaattgccaccctggtacaagggatgaaaattgacgatgtcattgaaaaattgcagggcacagactgcggaggccgcggtacttcatgtccggatcagctggcaaaggcacttctgctggcaaaagaacagaaggggcaataataggctgcggcctgacgatatatgaatattcgtcaggccgctgttttatatatgggattcttttccttctctttcttttcatggattttcccctttaattatgatataattcaaatatgcgctattatacttaattatggacgcccgtcatattttgcataacatcctatcaatttattaaaataaggagaatacacttaatgaccgagatcgattactccttacgaattcaagagaagaagcagcagaatccattcataaccaacacagatctggcatactgcctgcttcttgaagatattttaagcggtatccgtcttcctggttccagagtcagtcagagcagcctctgtcaaagtcttgacttgagccgttctcccatccgtgacgccatgatccgcctggaggatgaagggtatcttgtacagggtaaaaaacaaagctactatatctacattcttcagcctaaggatgctcttcatatcctggagtttcgtgcttctcttgagatactcgcagggcgtctggccgtcaaacgggttacttatgatgaattaaccagattaaaggataatctgcagcagacagaactttttatgggacaaaaccatcaggaaattattaagctggacagccagttccataaaacactgataaatgcatcaaaaaatgaatatctgacagagacttatcatacttattctaataaattttcctatctccgtgtttttaccgtctttcacgcggatcatcaggatatactcctcaggcacaccaacatttaccgcaatctctacaataaaaatgccgaacgactggagaaggcaatccgggagcatcttgacaacatgctggatgacgggattaccacctgcaaatttcattatgaagaataacaggaaccatggcctgagaccagtccatggttcctgttttgtctattttccgcaaaataccggctcccgcttttctataaaagcatttactgcttcttcaaaatctttggttctggagctgtcatacatggcgtccgcctccatataagtcagccttggtatatcggagtagatagtctggaggatattttcctttattcgttttatcgcataggacggcatagctgccagtctctctgcaaggccgtaagccgtctctgccagcttgccttccggcgctaaaagggcgatccccagttcgctcgcctcttttccccgcaaaacctctcccagcataatcatctccgtcattttggcggcgccgaccagtttataaagataatagaagcttcctgtgtcacctgtaagccccatcttgacaaagctcataataatcttgctgcgctccgtcataactctgaaatcgctggcagccgctatgcttgcccctgcccctgccgccgcaccgtttatcatagaaactacaggctttccgcatttacggacggcataacccagcattccatcctgaagcgtaccgctctttggtatgtaaaccttgtcctctatctgacgcttcatcctgttgatatcccctcctgcggagaaatgctttcctgcaccggtaattacaacacagcccacatcctctctttcactcagttgctccagcgcgtcccgcagctcctgattggtggcagatgtataagcattggcgcactccggcctgttaaatgttatagtggcaattttatcttttatatctacaagaattgttgtatattcagtcatacttatctctccttcacttcagcagtcccggggcgtttctgagagtctcttcgcattcttccatcagagagtccagtaaagccttgcaagtcgtaatttctgtacacttagcaacaataattccggctgccagcgatcccatctgcgtatctccatccatcattccccggcggaaagctcccgttccgaactcctgcagctttgccttaggcaagccttctttctccatttcatagaacttctccgcaaacggattgcgcaggaccctctctcccattccgcaggacattcctgtcactatggtagaactgtcatctgcttccagaagaagcttcttaacctcagggtgaaccgggctttcttctgtcgttagaaatctggtgcccatctgtactgcatcagctcccattaaaagacatgcagcaattcctttcccagttccgattcccccggctaccagcactggaatattaatttctcccaaaataattcccatcagtgccagtgtggtggaattacctacttttccccctgactccaatccctcaattaccactccgtcagcgcccatctgctccattctcctggcaagacgaaggctcggcactatagggaagaaacggattccggcccttttcaaaggttctatgcagggtctgggatccccccctcctatagtaaccaatgccggcttttcttcacataccacctgcaaaagttcatcttttgtgggggattcccggttcagattcactccgaaaggcttatccgtctgacttctcacggatgcaatttcttttcttaaaagttctgcggtcatatttccggatccgatcattccaagacccccggcgttggaaatagcagccggcatgcgcccggagcctacccaggccatacctccgcatataatggggtatttaattcctaacatttctgtaactctggtcttcataatctgttaacactcctttttaatgttttatagggcgttgggcagtttctcctcctcagacgcggcctttcgtataaagaagcccagtatagtggcacccacactgaacagcacattcccccagcagaagaatgcataaaaggcccatgtctgggaggtaagtccaaataattccgtgtaataaatacagctggtattccaggggataattgctatggtgggcgttatggcatcttccatagaacgagacagtatacttctgtgtatatccctgtcatcatagacctggcgaaataaactgcctaagagtaccattaccacaaaatagttgctgcagagcagtgtaagcccaattccaattcccacagtagccagtactgtgctccgatctgacttcagatggggaatcagtctttgtactatcgctctcatataacccacctcatccagcacaccccccatagccaaagccagtaccgctacaatgattgtagacatcatggaggatatccctccttttgtcagcatggtatccactattgtgctgcctgtgtcagaaataaacccggtattcataactgtaagcgcatctgcaaggttgtttttctgaatcagtaccgacaacaagcttcccagcagtgcagaaaggaaaatggttgggaatgcaggtttttttgtaatgctcatacatacaataagaagcaggggcagcagcagcaggggagagaagtgaaactgatctcccagggttgtccggacctcctgaaccagtgacgtgtccatggcatttcccgcatacctgacccccacaaagtaataggctgctgtgctgagcgccagcgttggaatcacatttttcagcattgcccggatatgagaatatagattaatttcgctggtgctggacgccagaatcgtggtatcggaaaccggtgatatcttatccccaaaaatagctcccgatacagccgctcccgcacaaatctccacagggatacccatacttacccccacgctgacacaggctattccaatcgttcccgttgttccccaggaagttccgatacaaactgaaagcatagcacacaacagacaggtgactggcagaatcgttttcacatccaatatccctaacccgtaatatacaagcatgggaaccgttccgcattgaatccaggttgcaatcagagttcccaccagaactaaaattaatacacagttaatcgcacgcttaacaccttttagaatcccctgctctatcctgtcgtacgatacacctaacataagagaagatacagtaagtattgccgtatttatgaggagcagaattccaaccgggacgtcaaaagacagccctataatcagaatgcctgcaattaatgcaacaatcagcagagaacaagtaaatcccggagaatcttccttttttagtttggaatacagtaccctcatccctttctgtattttatttcctgccgcggacaccgttacgaaccggcgcttgagcatatcttccttccatataactcataatactctgtgcggcttctatccgtccattttttcttgcggaggcggaataaaatgctgcatgaggtgttataattacattttccctgtgggccagtacatgggtatgcagatccggatgctcgtcattcagcacatccaggccggcatatgacacttttccccggtccagcgcatctgccagatcagcttcattcacaacagctccccgggaagtattaataaatacaactccgtctttgcactgatcaaagatctctttccggaaaaagcttactgtgtccggtgtcacggggaggtggcagctgatataatccgcctgtctcaggaattcatccagttctaccttctcaacgtcaaagcttcgggatacctcctccggcacatatggatcaaacgtgattacccgggtgccgaacgcctgaagtctttttgccacttcctttggaatatttccaaaacccgccagtcccacagtcagttccctcataggtttcatggagggatccgcaactgcactccaggtttcctcctcctgtatcatcttgtgaaacataagcagtctgcggttgatggccagcatcaatgcaaccgcatggtctgccacttcatttttacagtattgaggcgtgttgcagacagcgatccccaggtttgtggcagcctccagatccacctcgttaaagccaacccctgtaaactgaagcagcttcagtttaggcaatgcctcaagaaccctttttgtaaatggttcaaaatcacagatgaccacatccgcatctctgcactggtcaatgagcatatcttcatcattccccacatgtactggccgcacattcaactggtactgatccgtgagagtttctctgatgtattctattccgtctgtatgtttactggtgtagtatacttgtatcatacgctctctcctcttcttttatattcaaagtcctcctgatccccttctgcctatagggtccgcactcagtcctgcaggataacaagaccgtctgctgcagcaaccccctttcctttctcatatacaaataaggggttgatttccacctccgcaatgcggtttctgttttcagctgcaaaagcacttatggacgcaattgtctccgccagcgcttctatatccagtctttcgcctccccggtatcccttcagaaggggatatgacttcagggaccggatcatccagtgggcttcctgtatgcttaccggagcaggatacaataccgtatcccggaatatctccacaagaattccccccatacccagaagtaccatagggcccagcctgggatctacctgcactcctactatcaattccaaacctttgggaagcattttctggatcagtactccataaatcctggcctccttattgtaagttctgcaattttccagaatctggcggaacccctctgctacagcctttttactgcctaaagaaagcagtacccctcctgcatccgttttatgcagaatgtccggggattcaatcttaatagctacaggataccctatcttttccgcatagcttacggcctcttcttcagtcacagccaggtaagcttccggaaccggtatgccatactcatgcagcattcgtttgctctccccttctggcagggcgcattttcctgatttaaatgtcggaggagcatagatctgtaagctgcggccttcggcggtgttcttccagcacctgtaatctatgattttcttcagtatggggtacgcatattccggaggagggagcaccggaacccctgcccggttcagacgttctgtcatccctggatttctccctgtttctatcagagggattgcgactatggggaagttcgggtgtttcttaaccgccatttcaatggccgatactattgtctctgtgtccggccgtacctgctcgtagagaggcatgccgatgatcagaagccggatctgctcatcctccataattgccagcaaggtatcacggtaagaatcggcaatctctatcactcctccagttgtatccagcggattattgggggaagcatattccggaagaatttgtctcagtctttcttctgtctgtggggaaaaatgtgggcaattgagcccatacatctcacacatatctgcagatatggcactctctccccctgaaccgcatactactgctgccccgttttcctccggcaaagaaggaagcagtgataagatattgcagatggaggacagctgttcaatatcatcagcccttatcacgccaaattttcgaaacagggcatcataatttttatctgtacctgtcatactgccggtatgggaagccgccacctctgcggcccgccgggaacgtccgctttttaaaattactacaggtttttcacggcatgctgcttttttcagaacctcagccagcttttcagggttagagaacccctctacatatgcagctatcactttggtatcctcatcctctgccagaaagtccagataatcctctatctccacaatcttactgtttccccctgagattacataggagaaatctgatctggggctgagcagcatagaggtacatacctggccgctctgggataccagaccaatctttcctgcccctttgcgctgcctgaactgaaagccaaagggatatatgccgtcaacaaaattaatgtaacctgcgcagttagggcccatgagcgctatgtccttctctctgcagaactccttcagacggatctcatcctcccggtcctcatccttaccagtctctccatatccgcttgcgaatactacagctcccttcacctttttttctgccgcccccttcagaatcttatctaccgaggcttttcccgctgctataaccaccaaatcaatggtaccgggtatatccgatatttcggcataacaagtccttccgtacacctccttctttttaggattcaccagaaatacatcctccagatgggaggaaaagctttccataaaatatcgggtggtcttccctcccagactgtcagattcacttgctccggcaattgccactttcctgggctttagtagtttctttaagtccatctctctttcacctgcctgtcagctattattttaattaaggttctttcttgcttagtattataccgcgttttgtatatcccataatgatattcaccaggatcgccgcatagatccacaccagataaggaataaattttaatggttcgattccaagagcattggccgcatacacagaaccgctggtccaggggatcagaattactcccagtgtactccctgtctgcagtacccggagcatattggcggatgacagccctaatttgcggaatccctcccgaaacatctctgcagatacaaagttcgtcgcgtatacacttcccacgcaagcctgaatgatcatggttcccaaagtactggccagaataaagtttcctgctcttttgatcttcccaaacagtacatctgccaccacttcaatggcccccatccttgtcataagcccggcgtaaaccatggcaacgattatgaatacatacatgctggcaatggaggtcattcctcctcttcccgccaggttcagaaactctgccgaatattcataatctgccgtgagcatatctgtattaaatccagaatacgccgccagaaatccgttcgccagagtaagatgctgatacacccatcctatcagaatcgcgctgaatccagagataaacatacttggagcaggagctacctttaacaagatgaggactacaagtacagccaaaggcagcaaaacaaccggtgaggttttaaaggctgcggatacagatttaacaaaggcctctatattctccggctgggttccggcctctgcacttcctctccccataagtaaataagcaatacaggcaacgccataagctgtcaatcccgatgggagcatcagtttaattgcagtaaaaggatctgtattgtcacaaagctggcctgaaagagtaggcatatcggccaccggagaaaaaatctgtcctacatagcatccgcagatgaccgcgcctgccgccatggccgggtttaccccctgtacggtggcaacgccgcacatgataactccaatggtccctatagtcccccctgcagtccccagaatcactgccactatactgcaggcgataaaggagattaccagaacaaacgagggattaactatctgaaccagccaggaaattacgaccggtatggttcctgaatacagccaactgccaaccacaaatccaattcctgtgacaaacagaagcaggctgccgcattcccccagcttttcattaatgcccgccagcatatcggcgatggtcaggccgcatcttctggcaataaaggcgcagtagaaagcacttaccagcataagtacctccactctaaggcccataaatatgtaccccacaactgcaattacaagcagaaacataatcgtggaaatagcctcaacagcacttggtttgcgaacttttttctcttctttcatctgttcttctccttcttttattgggaattacagttatatcctgcccgaaaggcatccaggttcttctgattatattttccttttcctttttcctcaaaataacatacgattccattctccatcacttctgcggaaaatatctctgttacccgaacaacagctcccaacatagccaaattagcgcccttttcattatttacctcagaggccagatccgatgcaggtaccttcaccacctgaatgtcctcccggtagctcctattttccgcaacaatggaggaattcacaaacaagtaacctcctggctttatactctgttcaaatttgtctatagccggttcgttcatagtaattgcaaaatcaagggccgatgctgtggggcttccgataatagcatccgcgatttttacggtacagttggcagtgcctccccgcatctcagcgccgtaggagggataccaggttgtcttctttccgttccggtaggctgtgctggcaagcagcattcccgttgtcagcactccctgaccgccgaatccggcgcacacaatactatattccataagcttactgaaccccctttccatcttcaatgtattcccctgtgggatatacttttttaacatctgtctggatccttttccaggactgcagcggcgtcagcccccagttagtagggcatggagatagtatttctaccatagaaaagccttttttctctatctgtttctgcagagccttttttaccattttttttgtctcccggatatccctgggagatgccacactccccctggcaagataggcgataggaagtccggtcatcagctttgtcacatcaatggggtggcctgtcagctcaggatttcttcccgacgggctggacgtggtaacctgtccgtccagagtcgttggagccatctggcctcctgtcataccaaagtttccgttattaattataaataaactgatattctcatttctcaccgccggatgcagcgtctccgccaatccgatggcataggcacagccatctccgccccggccataaataatcttatccggacgtacacgttttgccccggttgctgtctcggccactctcccatgaggtcctacaatataatcacagtgaaaataccgtgtcatattattgctgcaggcaatatctatcatacctatggcctgttccgccactccaagctcctccaggcattctgcaagaatcctgtcaaaaattccatgaccgcagccaggacagtatttgctctctcccctgattaccgatggtgtacttcgcttcatttaaaacacctcctcttccttcaggtttcccgccaaagcctctttggcataagccacagtctgttccggtgacggaacaattttaccggaagcataggaatagaccggaatgcggaatcgaaccgcggtctgcacatcctccttcatctgcgccagaatattcatctcgaccaccacaagggcctttacctgaggacctaaatctttaaatgcttcataggggaacggccataatcgctttggccgtatcagtcccgcctttatgccctcctcccttgcctgatccactgcctgcattgcaactctggatgagatgccaaacgccacatagatgatttctgcatcttctgttttgtaattttcccatctctgctctgcctgtttcatcttccgtattttccccttcagagactctgcatacacttcccctgaaacatagttaaaagcatcggtaaattctttgttgggctgatccgccggggctccttttgctgtccagtcatacctgttgatgtccacttctttcatctctggaagttcgcagccctctaccatctggccgataaatccatctgccataagaattacaggctgtctgtatttctctgcaagatcgaatgcttcatatgccatatcggcacattcctgcacactgttgggggccagaacaataagccggtagtccccatgagaaccattttttgcaatctgccagtaagagtcctggctgggtgcaatacttgcccctccgcagccaaacctcatcaccagcacaaatagcgccggcacctctgaagcagtaatatatcccagcggttcctgtttcagggtaaaacccactgcagaggaggatgtcatagcccgtgcaccgcaggcgcctgccgcatacaccatactagcactggccagctctgattccccctgcataaacacgccccctacttcgggctgccgccaggccatccactctaagatctcactctgaggcgtaatcgggtacccggcgtaaaaccggcatcctgcgcgaaccgcgccttctgctattgcctcgtttcccttcattaattttgattccatttctcatcctcctctactctaagatttcatagacaaaatccgggcatacttcaaagcaggtgccgcatgcaacacaaagctcatcctttacttctacgtagttataacctttgtcgttcttatgcgctgatactgccagcgcatgttttggacacgattccacgcagtaatagcagcctttgcagcgcatggtatgaattttaattttttccataaccgttagctcccttcgttttcctgtgcttttgatgaggttattttagcagaggatgacaagtgttcaaaatatcaggaattcagtccctgtattgtctttatttttgttctttgcggccggaattgtattttatatcggaattcagcagcctgctccggccatggtatatatttgttacatacagtttgacaggatttttatcgtaaacaaaaaaacaggattcctatacttacctgtatagaaatcctgtctgctatttgattttcttttatctgtcccacttatcacaaagggaattaatctgatctgcaaatctggccagatctttattggcacccccttcattgcgtctgattacagccattaatctctgccctgctgcgattagccttgcgtagacacctcctgccttcacaggctggcctccaatctctgccttcctgatagggattccgaccgtttccttcactgcctggtctgccagcagatcgtaaacggtcccgctgaacggtgccatggtatcatactgcagttcatcggttagcttcttggcaaagatctcacataccttatcgtccccgtgaaccacaaaaaccttcctgggcttttcctgaaaggaagcggcccatcgcataagtcctgtgcgatccgcatgcccgctgataccggggaggcgggtaatctctgcctgaacctgaacctcttctccaaaaagctttacctcagtggccccttccacaagagcacgtcccagggttcctatggcctgataccccacaaacaaaatggtggactcgggtctccacagattatgcttcagatgatgcttgatccgcccggcatcgcacataccgctggctgagagaattacctttggcctttcgtcaaaattaatatctctggactcatcactggtaatggcaagcttcagcccaggaaaacttatgggattaatccctttcataatcaaatccatggcttcctgatcgtaacagtcatggtaatgctctttaaagatatttgtcgcctgtacagccaacgggctgtcaacaaaaacctcgaatccgggataccccttcaccaatccatctgccttaatctttctgaggaagtacagcatctcctgggtacgccctacggcaaaggagggaactaccacattgccgccccgggcaaatgttttttccagaatctctactaattggctgacataatctgtccgtatctcatgatctctgtccccataggttgactccatgataacgtaatctgcctccgtaagataggtaggatctttgatcagcggctggtccagattcccgatatcaccggaaaataccagcttccgctcttctccctcttcctctatccagacttcaatactggaagatcccagcagatgtcctgcatcattatatcttactctgatgccgtcctccagggtcagaatcctgttgtagggacagcccacaaactgcttgattacaccattggcatcttccagcgtatatgcaggaacaaattcctcttttcctgaacgtctgcctttcctgttcctccattcagcctcaaacatctggatatgggcactgtcgcgaagcataatctcacacaggtcacaggtggcgtccgttgaataaatatttccccgaaatccttttgcataagctaagggcagattccccgaatgatcaatatgcgcatgggtcagcaaaacaaaatcaatgtccgccatcgataccggcaattcctggttctcgtactgatccggcccctgctccatcccacagtctaccaaaaatttctttcctgctgcttccagataaaaacagctccccgttacctcatgagtcgccccaataaatgtaagtctcataaaaaacccccttttcggtattgagcttttactaatatcagcatttactctattataccctaaagggggaggttatgatatgattttcccttattttattcgatttgttaaaaatccgctgccgcagagtccataatattcattcagcatggataaacggatataagggctgatggtgcccagcgttctaaaagtatcggcatcactcagggtattcaccggacatgcataatatctgtaattattctcttttccaaatcccattacccggtaatcccagttttcttttgctccgcagttgggaactgccaggaatctgactttctctttcacataatgaaatctgtgatacaggcgctcaacatttccgggcagcagcatatttcccaacagcagggttccgttctcatattcggttagtgcctttttactatgtcccttcagtaaatcaaaatcgctcctgtgggtacatgccagactgcacaggtcacattcacccttcatccgtcccttgcaggactgaatgaacgaaaatggcttcacggacattacacagtcctcttccactaaatcatcctcgatggagccgtgatacataactatggtaggataaccatttccctggtataccccaaaggatagcacccaccggttcatgatcaggtagccagccttatagaccgggacaaatccatcctcttccttccatatcttctcatccaaagatttctccaacggctggaagtatccgcccggtatggtatcctgaccttcataggcagggccattccccatgagatacctgaactcttccacacccttactcagcgcatagcggtaaggatccctgagaaacgttctccctttagaattcagtgtaagcttgtccggctgctcctgcccttccaaatggcggagcagactggcacgctgctttttatctatgtacggcataataatctgttttacccttctcagctccaacatctcaataacatattccagatattgaaggttcaggtgtgagattaccagcagatcaatagggaatgtttcatcagagaatcgcgcatcctcgctgagcgtcctcgggatactggcatctgctccgcagagatataccacactggcagtgtagtcctgtggttcgttccacatgcttaatatgtggtagatgccgtcattcatgtttctaaataaggtgcgaaagtatagggctttcatggggttgtgcctcctgttcttttatcttaattttttttattaatcaatccatatcccatttgtacaagtatctatagattcatacgtatcaccatccttggctgcatgaattcctcttacccggtaataataacctttttcaacaggaatagtgaaggattttacaaatagtgatgtgtcctctttggaaactgcccacccttcaaaggtagtccagctttctgtattagggtcatattgatccaatgacaagtcaatatatagttcctgacatacgacatgtgccacagtagcaccggacgcagtaacttgtccctctccagcattaatacatttagcagtacccttattaagcaaaagtcccctcaataaagaattcttagtatcttcagcttctaggtccgtcgtcaataacgaaccatcaattacacgtcctaaatgttctggctctgctgctaaaacaatttcctcatgtctaaaaacatatagaattaatactatgaatagtaacatacaaaattttatattcttatttaaaccttgcatattgtctcccttccaaatcatgtaaactctctatactaagaaatacgatattaaaggctaaaaattacactaaaaataaatatttttaattatttttatgaattcctctatttctatctttcctgatatctcataatagcaatttttatattcccattgagctacatagcatattccatcttcagatttatcctctagctcccatacatttacattaatagtattatggttgatttcaaatgtttgtatatgctttccatcatatgccgaaagttcagtagtatcatcctgattattagaaatataaaatgttagcaattgatctttatattcgtactgtataaatgccattcctccatcaagatctttatcatatgaaacatatgtcatttcctttggaatatataatagattaggtatttctataccaagctcatcttcaatagactttttaatatcctcttgctcctctacaccctcctttctattcttgtcattttccaaagccaacctagtatcattcccaaaccatgtatctaccttctgaattaagtacaccctattcgcctcactagtcatagcaaccccaaatactcctgacaaaataaggcaaacaatagctgcacattttccagcccgtttccacctggaatagaataccacttttttcttttcctctaccacctcttctttctcttcgttaacatcttcttcgtcttcatggtatatgcctttgtctttcaattcctgcacaattcggttgtacagctctttgggaggatccatactgtctatgaacgggtcctcttccaattctcgttcaatctgttcagcctcttcccgaagagcttctatctcactttttgtcataaaaatctcctctgaggcctctgctttcggtttgttattttcctgtgataatttctcaaatctactcatgaaacccttatctttccttgacttttttttgcaagtgtatcatatttatctatagttactattttgcttgatatgtaggaggaaataaatgaaacatattgttctcacgggcggcggaactgccggccacgtaacaccaaatatcgccatgattcccagattgcaggaattgggctacactatttcctatatcggttcttacgacggaatcgaaaaaaaactcatcgaagaactggatattccttattatgggatatcttctggtaaattaagacggtactttgacgtcaaaaattttaccgatccctttaaagttgtaaaaggatatggagaagcggcccggctcctgaaaaaactgaaacctgacgtagtattctccaagggaggttttgtcactgtaccggttgtaattgccgcaagcagacaaaaaatccccacctttatccacgaatctgatatgactcccggtctggccaataagatttgcattccctttgccactaaagtgtgctgcaactttcctgagacagtaaatgagcttcccgccaacaaagcagtcctcaccggtactcctatccgccaggaattactttccggggatgtaaaaagagcccgtgcctttaccggcctcactgaagagaagcctgtaattatgataatcggaggaagccttggggctgccgccatcaatgactgtatccgcagaatccttccggagcttctggaagagtttcaggtcatccacctgtgcggaaaaggaaagctggatgagtctcttgtgggaacaaaaggctatgtccagtatgattacatcaaaaaagaactggctgacctgtttgccctggctgatctggtaatctccagagccggcgccaatgctatctgtgaaatcagctcactcaataagccgaatctcttgattcctctgtccgccaaagcaagcagaggcgaccagatattaaatgcgcgttcctttgaaaaattgggctacagtatggttctggaagaagaagagattacagataaaacactgctcttctctatccgggaattatacggcaaccgccattcttatatggaggctatgtcagagagcaatcatattgattccatcaagcatattgtagatttaattgaggatgctgtgaattaaagcccgtcatattccgactgataccgcttttgcgtccatgactttgcccggtggagcctggttctcacattttctaccgtgatacccagctctccggcaatttccgtggcatctttttgttccacatagcttttctcgataatctcatgccaattcttattatgttcttcgagatcttccatcatttctttgataaattcctttttgatgtagtcgtctgccatctcatcttctacataacaggctctggcatgatggcttctcctcacattcgcatcctcttgggattcattctcaccatactcgtaacctaccgtttcgtacttcctgtatgctttcctgcagtaatcaattgctttgtgttttgtagtcacaatcagccagtattttatcaagtcatcgtttaattcctgtctttctaccagctggtaaagagatacaaaaacttcctggcatatgtcctgagaccatccataatcatgtatcacattattagctaccttagtggccagactccagtacttgtcatacaacgcttgtaacttcttgttaatattatccatcttttctggtttcctttataacaatgtcattaagttaagctgacattgtgaaagaggcttccgacacaatcaaaacggatatatcattgagaagtggtatgtccgtttttgtatgttttaaaaaaaatacttgacaaatttcagctcatatgcggcgcagcccttagaagaggaggtacagcatatgaatacttttgctgaaaatttaaaacatagtctgctttcaatgattgatgaaatggaattctacgagcttgattgtttcgttcataatccggacaaagattttaaacgacaacgaaaattcactttttcttctgtcatgcgttttatcttatccatgggaagcgcttctttaggtcaggaattattgaagtattttcactacaattcagatttcccctctgtttctgcatttgttcaacagcgtcagaaaattaaaccggaggctttctttgagctttttcgccgtttttctttaaaacatgaagaaatcaacctcttccgggaatatcgtctgcttgctgttgacggttcggacatctctttgcctctgaatccctcagaaccctttgcttttcctgagtccaaatgttctatgcttcatctaaatgcattgtttgatattatgagcaggcaatatgttgatgcaatcatccagggtaaacatgaatcgaatgaaaccgctgcaattgttacaatgacagatcgattaccggatcagtatcctgtcatcattgttgctgacagggggtatgaaaactacaacttctttgctcatgtggaggaacgcttttttgattatgtggtaagactgcgtacttcaaaaagccgcagcatgtttgcagggttaaagctccctgatggcaagccctttgatattacaaagaatatcgttattacgcgccattccacaggaccgtatgctgtcgataaagaaaaatacaaatatatgacaaagcagtcgcgatttgattttatccctgactgtaagcatcccgactatgaaatgcttattagatttgttagtttcccgttaaatactggagaatttgaagtccttgcaacaagccttcctgaatcagaattccctgttagcgtcttaaaagaaatctacaatcttcgctggggaattgaaacttcctttagagaacttaagcatgttgtaggtttagctgcttttcatacaaaaaaagcagactgtgctatgcaggaaatctatgcacgtctaatcatgtacaacttcagtttgcttattgcaggcaaagtgatgatacctgagcagccgtgccgaaaatacaggtatctgattaactttgctcaggctatcaggatttgtattgagtatttccgaattcacaacagcagtccgccttttgatttacaagctcttctctcacggttcatccttccagaaagaaaaggaaggacctatatccgcaaagtatatccgcagggagcaaaagctttcaactacagattaacataaatgaaaaatgggcacaagacatttatcgcctatgatggtaagcataggtgctcttttgatgcttcaaaacatacaaaaacggacataccacttctcaatgatatatccgttttgattgtgtcggaagcctctttcacaatgtcagcttaacttaatgacattgtcctttataagacctactttttctggaaggcagcaagtatactttccctgtcttcctccgtcaggctgcctggtttccatccaagagcaacgttgtcaccttcgtaccgcggtattaaatgcatatgaaagtgaaaaactgtctgccccgctatctccccgttattctgtacaatattgaatccgtcgcattttaaaacttccgtcattctttctgccatcttttttgccagcaccattgcctccgctgcaagctctcccggtatctcataaatatctgcatagtgagcctttggcagaatcagcgcatggcccttgctggccggaccaagatccaggatcactctgaagttctcatcttcaaataatgcagcggagggaatttccccatttgctatcttacaaaatatacattcggacatattattgtctcctccttttgttatatatttgtttctttttattttgtcgtattttacgagtttttgcaatacaatattgtttgatatttacaaagtctgatgatacactgtaacaggaggtgcaaaattatgttaaatgtgcgcgaatcagaaactattgaagaactttgtatggaaaatccagatatcagacgtttcttatctgaattagaagacaaccacaaatttactatttccaaaatctctcacgagatacggaaccctgtaacattaattaacagtttccttcagctgctggaggtacgctatcccgaactgtccggtgatgactattggaagaaggtcatggacaacatgctgtttctccgatctctgctggatgagctatcttcttataataattcggaccgggtggtgagaagcgaagcaaatatttacgctatactgtccgaaatcgtagagtccacccgccccacactggaacaggatcagataaccattcagctgataaagaaaaccgctcttcctactttacctctggataccgttaaaatgcaacaaactttttacaatttcatccgaaatgcccacgaagccataggaacagacggagctatcaccattagcctggagacagacggttccgatatcaccatacagatctccgataccggaaaaggcatacctgcggagcatatgtctgaacttttcaaaccctttgtcacctacaaaaaggatggtaccggactgggactttcaatcgcaaaaggtgtaatagaagcccataacggtaccatccaggtagacagcaaagaaggtgagggaaccacattctctgtcatcctccccatctgttaatcctacataatatttactttttttctccggtaaaggagcacgcccagtacaaatccgcagatcagcccgcctacatgagcggcgttatccacgcctgcgctgatgaatccatgatataaggtcagacctgcaagcactaccatctgacgtgtggtcagatcctccagcctgcctttattcactataagaatgtaaagcatagccccgatcactgcaaagatagcgccggaagctcctgcggatacactgatacgcccgctgctgcctgatatctctgtgtaataagagatatagctggcccctatgccgcccagaagatagataatcaggtatctgacccttcctaccgcccgttccaggttatcgcccaggaagcccagtacaatcatattatttaccagatgtgcaaaaccaaaatgcagaaacatgcaggtaaacagacggtaatattctccttcctggatcagcggcggaaatgcggcaccccacgcaatcatatgcatgctgtccccggaagaacccgttacctcaaccagaagaaataccaggatattaaccgcaatcatcagggtatttataatcacgggctttcttttctgcacctgaatctttaattcgtccagcctggatggtccctgggggggataataatattcattcatggataaattctcctcctgacatgggaacattatatagcttttgcgccgggaatgcaacctgcatcccctactctattcataataaaaaatcacatctgcaattttcacttcatcatgttcctgcagaggatatttctcacggctttcaagaagtcttccgttgacatacgttccgtttttcgaattcaaatcctgtatcaggcacaagtcccgggtcacttcaagcttacagtggatccggctcacggtagccaggggaatgcagtaatccaccgcctccgccatcttgcctaccagaataaccccctcttccagtgtaataagtttcccgacgctgctgccctttccccgcagacagtgattccttccctcttcctgcccggtcaaaaggctggtctcctcaccggaggactcccaggcttcccttctggttttccctgtctcagagcccgtttctgcatctggataggggatggggtgttctggactgtgccccgccttttcttttgtcccttctccaggggataacaattctttctttcgtctgcggtaccagatcaggcctgcgattcctgccagcgcaagcagacctccaaagccggcggccagataattccagggaatgtaccggtaattccacgccagaaagcctcccccaatcatcaaaatccccccggccaccacagctgctgtcttgatctcctccctactcccgggaaattcttcttcttggggctccctgcatatctggcgcaatatctcttctctctcatgaacctcctcttctgcgccgccacctgtctccgcctccccggaaggttcctccatctgctctccctcagaagcaaataactctttttctatctgttccagctgaaaattatcttccgtcacgcagtggtatattccatacccaattctcacggcatctggatcctggtggtctattttaggcagaagatattccatcagctccctcatgccctccctggcgtctccctggtgaaccgggataaagctgaaataagccctttggccgcccgcctccatgtaaatatgctccggctctaaaaccagatgccctgggtccagcagataggcctgcatcactctgatagtattcaccaaactttttaagatgggatagagctcctctcttcccagttttttgtccccatacattgtcccaagaggctgcctggaggttatctcataatagaagagagtacggttatctattttctgaatggagcagggaagcagcccgggaatagaattcatcaggatcatgcggacctcatatgaagccgtatccacctccccctcttcctcaaagattaaataattatggttcagatccctcttatagtccccccgcatatacctctgcctttctgatttttcggatgaattctacagggcggagtacctttatttcacccttcccctgaaattcccacctgtttcttagaaacggaccgccgattcctccctggtaggtaaccactatacggctgctgccggcactcagcccggattgtacagtgcctgataatatccccccgtttccctggttgtcttttatcttagattcagctatatggcgggcctccgtaagattcctggctgccgcggttcccgcacttacggccccctcataggcagcggccgtataccaggcccgatggtatacaaaaaagcacagatacagggtcacggtcagcaccatcaaaaccaaaggcatgcataaagctgcctctaccgtaaagcttcctctgtattcttttatctgtcttctttttctcagttcacatactgtggtcatacctgtctcccttccctgttccttatccgatccctattctgtacaaaagtctgcccgccagtccgaagaatagaaaaggcagaaatggtatccgatcttttctccccttcttcctccctgccataaggcaggcggcccacaaagatgccagcgccagtcccaaaaggattgtctccagggtatcccaaaggcccagataaattccagccgtaataactgacaatccgtccccgtatcctatggcctctttggttccccgccccagcgccagcagcagaagcccggggagcagacccgccgcccagaagccaaacccttctcttccatacatccacattccaaatcggagggcgcacccgaggatggcagcggctgcaatcagccttccggagacttcccttgtcttccagtccctccagcccacagtcccgagaaatatcagacagacagcttcatgaatgcccatggctgccgcacctggaacagggcctgaggccgcctgtctctgacttcttcaccagtctgaccgtcctggtaagtcctccgcaggtcttaaggctgtgatacctgtctcccttttccgtaatatagtaccctgctccgctggtcccttttcccacacatttttcacaggggcggtacttttccccgtattcatttctcgcagacgccagccccccgctcccaatatagtgaatagaaagctccagatacgaacagtcttcgcgcacatgatatacttcttggttttgggttatgtaaaccatctcattctcttccccctctgaaccaaaatccatatccttctcatacccggtccaggctctggcatagcctgtgcaggtaagtgttaccggcatgacagggataagagcagccgacggccggtacctgtattctgcccgcagcgtaatctgtccgttatccatggcagaggtctgtaaacggattccgcccgactttccctctatccctgtaagtctctcacccttcagctgtttcttcaggttttgtttggcataggccatacagaccgccgcggttaccacccccaccggggaatccttccgggttttatcccctgcataggcgtacatccccagctcttttgcactctgacagagagaggaggtaacaatcacctgaatcctcataacgtccagaaagcagataaaaatcaccattgccaaaaagaacatggggagagcagccgcacactctatggtcatacttcctgacagggagcacaaggataccttcccctgcttcctgcatgtgtcctctgccggggactgcagaggcttatttacttgaagagagtgatttttggttattttttcatttgttatgttttgcatttcacaggcaaaaggcatccttctattcccccttcatatcgtatccatagcttcttataagactccattcctgcccccggggaccaataagcgtaagctctgcctccgccgattccagacactgatccagccggaagcctcccttgccctctgtctttctcatgacattttccaccatatccatacacctgtatacctccgtatcttccttttccaggctcagatacagcaggacccgcagatatccctgatactccatgccctctgtacctgtccccccttcctcccggagcaattccaggatatgggggagattattcagagacagcttccactgcccctggctctttaccaggggaaccctgcccccggccagcagatcccgcacatccagcaggctctccccgtaggcccagcacaggctcaccagtgtctctgccagctgctggcccgcagggatccccgccgcggatgccagggtaagccccagggtggccgcctgtccccgttttacaggatctgtgtaaatagcggcataattcgcagcttcccggatcagaagcagccgctgtactacctttctcagattctcctggtcactgtcctgtcccgccagaatatattccagctgataagacaaatccccttctctgcagggctcgctgtaattgcccatcttcttcagtacatactcctgatagagcagagtctcactcacgccggcatcctccggtcttccccgggaattgccaagcccctgattcagggaacggcgggacaagaattctgatacctctgcctgtttttctgatatgtctccgctgtcaggaaccaccagccccagaacccccatttttttcacctttcgcaatatctctatgggattctcatcccctgggatcggcattgtctcatcctcagccctttccgtctccccggtttccgcctcctgatactcctccagcatcctgtcatattcttccaagtcctccctctcccgaagcttttctcccttctcttccaataccctgaccgtttcactgtctcctttcgcctgcttcaggaggcgggaaaccgcctggctccccagagagtctctggtccatgcagctgcctgtcttttaaaggattcgccgccgctgtcagtggccaggcagtatgcggtcagcccgcactgttttacagaagtcttcataagatccgtctccagcaccttttccatcccataggtgatccggtctgtaatctttcccagcttcatccggttccccccgtaggccccatccagaaaaaacagctcataatgctccagcagatccctgtcatattccccgaagagggaatagagagccgcatctgccccgccggccgcaactgcccttgcagatgcgttttgtaccgaacggaagccggcggccaccagtgcagtcataatggtcagggtgagacacagcataattgtaatactacccttggctttcacactcctgccctccttttcgcttttaaggctaaagattgttgctttcctttgtaatcttagacaaaatattgtttaccagactggtaagctgctttttaaaaatcaccaccagcccaactaaaaccaccagaatcaggattatctctacaactccaatggcatcctcttcctgtaaaaaagctttccactcactcatattctcaccccctttcttttcaataaaatgtcagatatgcgggtaccataagaatcaccagaactaccaggagcataagaaacataggcaccagcagtttggaagacacctgctccccttttattctggcgtttcggatgtggtcatcctctgcttctgccgcctccctctccagcagctccagaagtccccgcccgcccttttttagattttggaaaagcagggtcgccagggttttgtagcaggggagacggcatcttgccccaaaccgctggtaagcctctgcctcagagatgcctccctccatttctttgcaggctgcggccatctcctcatatcccggccggggtccgcactgtccccacttttggtaatctgcggcaattctggtaaacgccccctttatggtcattcctgctcccagaaaaagaactagcttgccaacgatgtctgggtagtcccgaagcagcagctccctgcgttctttttcctttttgtgcttttgctcttcctggcgggcggcggcaagaaccgctgacagaacggccaaaagacttacccaaagccctgtatgggatgagcttctcatccagcggaccgttttgccttccaccttcccgggcagatataaccggcctgtatcctctccctgattttccttttcaatgccctcctgcagctttctcaaggtctgctcttcccgggaaagctgttgggggaatacctttacccggcgttcatacagctgtctgctctctcccagggacagttctccctgaatggtgacaaagactccctcctgggggatctcctccccaagggtcccctcccagtccaggatctgtggatgatccgtaatccaggagacggccacgggagaatccccaacgtgttccggaagatgcatgggcttccttatctcatccacagactggttgtcccccagaatctccccatccagcgcctccgcagtctcctgcataagcttttcagcttcccgtctgctgtactttttttcctctaccgttacctctattttcttcttttccccttcgatctctgcctccatctcctccgtatacgccccgcccccgtatgtatttctctgaaaataatcttcctggctccaggcccgcgctcttccttcatatatgccgataccgcatcccagaagcagacctgccgcggcaataagtaccggaattttatatttcaatttctaccatcttccttcccatgtgatacgcggccagataagtgagcaggcagccgctcataatcccggctcccagagagttccgataaaggacatccagaaacccgggggatgtgacctgcatatatacgattataccggccggcataatactcataattttctgttccagctttctggccgcaatggctgcatcaatttccttttttatctcaatcttcccttccagcactctggcgcttttctccagcgcccctgtgacatctccccctgtgcgtttggctgcggagagaatctgggaaaaattatagatatcctcaacccggcttctctccccaaagtccgccagaagcttttccagggggatccgattgcgaagctgtgcctgcatatactgcagctctctggtgagttcatccccgtccccatacagccgcctcatatctccacaggcttcccctacagcgttttccatagaatacccggccctcagggccgctcccaaagagccaagagcgtccttaaagtgataatgcagtctttgctttctggccctgataagttgttttttcttttctttcagataataaaaggtaatgggaaccatgagcagaaatgcccagactgactgatagaacagcagattcactgcaatgcacaaaagcccgctgattcctgtgtacttcagcagctcttttttggaaaaggcgtaggaatcgtactgtattctcatatgccgcccttcctttttcccatgggttcccccaccttttccagccgttcgccgttccggcggataaacaggggatgaaggcagacctccccatgggatatacctgtaatctctgtaatctccagcacggctctggacttgtcgggcatccttcccagatggatcagtatgtcaaagcctgccgcgatttgacgccggatggcttccaggggaagctgtatccccatgagcaccatggtttccagacggcttaccatatcagcggcactgttggcatgggccgttgaaaggcttccctcatggcctgtgttcaccgcctggaggagatctaccgcctcggaggatctcacctccccgataatgattctgtcaggccggagccggagggctgttttgataagatcccggatagtaatttgagggctgccctccagatttgaaagctttgcctccagccgcaccagatttgtgattccctgtatctgcagctccgcattgtcctcaatggtgacgattcgctcttccgagggaatataacaggacaaagcgttcagaaaggtagtctttcctgctccagttccccctcctatgagcatagaatgcttttgcctgaccatctgtatcaggcattcggccccttcccgggtaatgctgttcccggcaatgagatcctccatggtaatggggtgatccggaaaccgccggatggtcaggatcggaccgttcagagccacgggttcaatgacggcattgactctcgcaccgtttttcagtctggcatccacaatcggcctggaagtattaatcacccggttgcagccagctgcaatctgctggatcacatcccagagcttttcctgggaggtaaaggttttctcccacagcgtgattctgcccctccgctccacaaaaatctgctcccacccattcaccataatctcggttacttcatcatcctccaccaattcctgaagtacatccagcttcctgacggagtagaaaagctcctgccggatctcctgcttctcctccagactccagcattcttttctcccgtgttccaggaccagttcatcaatcatctggagaatctcgggatcctctgcctcccaggcacctatgtgctcgatctgctccagcagctcacggcgcagggcctctctattcctcatacagcttccctccccgcagaatctctctcacatagtcacccagctcactccacatcagctgagacacatattcttctccccggccgaaatagttgtgaaaggggggtgtaatcttttccgtcttcctcagaacctccctgcagtcccacaggctgagcagtttttcaaactgcaggacttttgcctgggacatggcatcccggagcaccggcatgtagatgcgcctgcacaggtccagaagacgatataagccgtcaaccccgtcgccaaagtcaatgatgacagcctcatacgcgctgttctctacaatctgccggagcagatccgtccattcttcgtaggaggtgctgcggatatctcccggggattgtaccggaggcagataatccaggttattgattgtctgcaccatactattcagtttaaataccagattgggatttccctgtctgagataatagatcaggtctccaagattcctctcgtaggtcctgtcaaacaggccctcaaaccctgcatattcttccaggttcagatataagactgcctgatcccgggcaagtatctggcccagagtcagtgcgaaagatgttttcagaactcttcccagaggggagtagacgcctataatggctgtgcgccgcttcataacctgcaccttcagaggctccggtgaactgtccccgtagcaggccataacctctcttatcacagcatctgaggactgatacttgtacacactggggtactgatccagcccgggactgtggactccctcggataatatcataattttccccggggagatggcttctaccctgggacacatggctttgtcggatatgagcaatatctctatgggatgagtctccccgtaggcacacaggctttccacattggtaaacgcctggaactcaaaggggatattcttcttctggttcatatattccataaagtggcaggcatacgaaatttccaaatcgcataccgcaaaaatactttttctcaatagtaacctcccgcatacatcagcattcccagcaatatgggaacggtaaagtgaatattctccggccggcttcccctccggcaataaggttttttctccccggttttcaaatagtctctcagatactgccccaggtatgccatcctttccctggcattgccgcaggatatgagaaatgccccgcttaagattcccccccagaggaaggaccaggccaggccgggaaggattccccttacccccagaaggccgcccagcactgagagcagctttacatcaccggctcccagcatacggaaataaaacagagggtataaaaggagtattggaagaagcccgccggataaaaaggtcagaatccccctgtacccgtacagcagaacttgatagagaatccccgttccccagcccagccagatccatggattccatattctttcccacagcagatccatagccaaagctccggcggagagcagcaaaataagacatacctgcagtgtcacgcattcacctcgattcctgtgaaatttaaattcgtagttggaaattgcggccgaacggcctgatagaaatacagcttagaattcactgctgtattggatttttattatatctgtccttttgggttttgtccagtaggattttagaaaaaaatcgcttttgtgcaacagtgacaaaaattatcaattgcattgtaataccgattgggttaaaataatttatatatttccagtattcgaaccatttctacaggttcaaacgcacaaggagaatgcccatgggaactatagtatttttaggagacagtatcaccgatgccaaccggcttttttccgaaaatggcttaggtttcggatatgtaaatcaaatcgcagacaagctgcaccaggcaaatcctgcctgggagattatcaataaaggggtggacggattcgtcgccgaacgccttgtccacaatctggagagagactgcatcacctaccagccggactatgtgtgtatcctggtgggaatcaatgacgtaggcatccttatgaataccgtgacaactgaaaaagagcgggactatctgctcacagacagtattcgctcttatcatcagctgctattcgaccttaccaacagcaccaaggcaaaaattatcaccctggagccctttatcttcccccatccccaggagtatgcaaactggatcccctggcagcagacactttccaggcagatccaaaagctgtccaggaattacggggttaccttcatccctcttcacgacgccctgaacggccaggctgaagagctggggtacgacgccatcaccacagacggcatccatctcacagaagcaggacatcagattctggcggatgagattatgaaggcctggaatctttcatgacaacgtcctcaaagaccgcagctgcggtctttgcaagatcctggggattcagccgtatagtagtccctatccggcctccgctgatatagatgctgtcatatgcccgggcactgtcatgaatcaccgtcttatactgcttcttcatccccagggggctgcagcctccccgcacatagcccgtcacctggagaatgtcctttacatgaatcatttctactgatttttcccccaatacctttgccgcctgtttcagatccacttcctcggcaatggggatcaccagcacataataatttttgctttttccctgtaccacaagggtcttaaaagactgctctaccggggcgttggtgagctctgccgtgtgcagtccgtcgatgaactcactgcactcataggaaatggtctcataggagatcttgttcctgtcaagaatgcgcatggcgtttgttttggcttcttttttacccatgtttttcctcctaatcctcggtgagatacctgggggtagacagatacctgtcgccggtatccggaaggagcactacaattgtttttccctcgttttcgggacgcttcgccagctgcgctgccgcatatacagccgcaccagcggagatcccaaccaatatgccctcattggctgcaatttctcttccggtctcataggcgtcctcccctctgacctggataatctcatcccagatatttacatctaaggttttgggtacaaagcctgcaccgattccctgaagcttgtgagggcccggggcgcctcctgagagtaccggggagtccgaaggctccaccgccaccaccttcacatctgcctttctgctcttcagatagtttcccacaccggaaagcgtccctccggtacctacccctgccacaaagatatctatcttcccgtccagatcccggtaaatctccggccctgtagtctgcaggtgcatctttggattggcggggttgtcaaactggcccagcacgatggcgttggggatctccttctggagctgttctgccttctctatggcacctttcattcctttgcttccctctgtgagcacgactttagctccataggccttcagaagatttctgcgttctacactcatggtctcaggcatagtcagtatcgcctgatatcccttggctgccgcaacacttgcgatcccgatccctgtatttccggaggtaggctctataattgtggcccccttctttaaccttcctgcctgttcggcatcctcaatcattgccagggcaatcctgtcctttacactgcctgcaggattaaaatattctacttttgcaattactctggctttcagcccattctttctgctgtaatttccaagctccagaaggggggtattgcctatgagttccactgcactttttttcacattttccattgctgatctcctctcattctcttacttttattttatatcatacttaaccgctgggattaatatgattatatactcccatccttcctttgtcaatagaatccttgttaactttatgctgtattttctcttgactttgcagccggaaggctatagactcgagaatcatacccagattttcatgcgcaagcaatagaatatgtcaaaaaggaggcatactacataatgaactataattttgatcaagtcatttcccgcaggaggacaaacagtgtaaaatatgattttgctgccaaatacggcatgccggaggatattcttcccctgtgggtggcggatatggattttccagcggccagcggaatccaagaggcgctccgtgcctgcgcggaccacggaatctttggatatacggagcccggcccggagtatatccgcgcactccagaattggtactcgagtcattttggcttttccatggaaccagactgggtggtgaaaaccccgggcgtagtgtatgccattgtacaggctatccgggcattcactgcggagggagacagtgtactgatccagcagcctgtctattatccctttgcccgttccattgaggaaaaccacaggcggctggtgaataaccccctttgctgcagagacggacactataccgttgacttccgggactttgaagataaaattctgaaaaaccaggtaaagctgtttgttctctgcagtccccacaatccggtaggccgtgtatggtccagggaagagcttcagaaaatgggagagatctgccggagacatcaggtcctgatcgtcgcagatgagattcactcggacttcgtctatccgggacacacgcacactgtcttcggtgcgctgggccaggaatttctccagaattccgtcatctgtacagcccccagcaagacctttaatctggcaggtctccaggtcagcaatatcatcattgccaatccccgcctccgggccctgtttcaggcggaatgcagcagaaacggatacagcaatctcaatgccatgggccttgctgcctgccaggccgcctatgaaagcgggcaggaatggctggaacagctgaagctgtatttgcaggaaaatttaaagtgcatgaaggatttcctgcaaaccgagctgcctcaggctgtactcacagagccggaagggacgtatctggtatgggtggatttttcaaggctgggatattcccccaaggatctggaccgttttatgagccgcaaggccaaagtctggctggacggaggaaccatgttcggtcctggcggggaagggttccagcgattcaatatcgcctgccccagaagtgtactgatggaaggcctgacgaggattgcttctgcgttataagtagaaaacagaataaaaaaacgctcctttggaatactaatgtatagtacttgcaaaggagtgtttttatgtgtcataaaagtaaaaaagacgatccctaccgtgtggaagctacctctctgcacgatctggatacaagcgccaccacagaaatgaccgggctgattcccagctcacccgagacggaagcagaactggattcctacaaagccctgtatcccttcagccccgatgagtttgtagactgaatcctctaccgccgggtctttttgcccaggaaacggtcaaccccttcttcggctatgagtaccacggtttcctcatgggtaaaatctgtaatatttttatcaaagagaatgtttgcctgggcgggaaactcatcgtccccgtcccagaaaataaactggagagggatacagggaaaagcttccgcataaaatcccacatcccccctgttgatcctgacaaatcccaattcccgtcctctctcctccagaagctcctttttcccgctgaacgactgggcaaaaggctcaagcaccatcttttgaaaggcactttcaaagggagccgccccttttacctggcggaagggaatccattcccctgagttcctgggtttctccttagaataataaaacagatggtatatggccatctgcgtggaaaaagttatctcgtcttccggatcctgcagatttgtaataatccccgtcccccgatcgatccggtaaggccggccgaagtacaggatatccaaaaagcccggacggcagccctgcaaattcagattcttgtagatcccttcgtgatcccaggtgagaaaccgctctctccaggtcacacacagtttttgatagttggattcatattccatccagctttatcctctctttctcttcctttttgtaaaaaacaggatacttcccctcaaaattagcccacacacagcatgggtatttactgaaataaaaggtactgaacaaagtttccgtcacgcttagctgaaaggtaatggaaaaaagctccggcgtcagattaaaatacaattcttcctctttgatgtccatagccaggagataatcccgctgctcctgattcaggacctttctcacgatcctgcgttccttttcacttaatctcccgtaatagaagtccacaaaagagttttcccacccatttctccagatcagctccagaagctttgttctcaaatactctccagttccggtaagcatcttgtatgcataccggtcaaagccttcctggatatgtgcaaaatagatacagccttcttccttcagttcatccagggatattgcctggggcagtgtcatagatacctctccttccctcatgtttcatactatgttcggtataatttaatcttatactaacttatctgaaattacaatgggcaggcagacgaaatcttaattcgtctgcctgcccggctgctaatatttgatatccagattatgtgaaaccctgtattcctgtcccatgattttcactgggatctccccggactcccggctctctatatggatattcttatgagagacgcagatctccatctttttcccccggtaaaccgtatgaaactgaatctcttctatctcttttgggagacaaggcgcaagatacagcgtatctttctgtatgcgcagccctgcaaaaccccggaccactgccagccagatccctcccattgaggctgcgtggattccctcatcggaagaataaggattctgacccatatctatatcaatggcatgcagaaagctggcaaaagctttctctgactccccgcagtcgctggccaccactgagtagattgccctgctcagagaggagtcgtggatggtcttgggctcataatattcccagtttgccatcttaatcttcccggaaaacaggtccgggagcagctccataagcataatcacatccgactgtttcagcacctgcatattgtttacctgctctctgctgtagtccttcagtatggtctgtttaatattgtcattgcggtacccggaaatatccagtattttcttggacataaaggtgtcatcctggggaatcaccccgtccgggttttccagaggctggggcagatataatttatccgcgaagtcttccagcttctccagtattcctgtctcctgaaaatactcctccgcccgtaccgcccttttgccgtccccgtctctgagaaggtgtatggcctgtctcgtcacataatgggccatgtaattgctgtaggcattattgtccacatgctctgtgtactcgtccgggcctatgatatcgtgaatctcatatcggctgcgttccttcacataaacacttcggctgcgccagaacaatgcagaacctataatcagaagctctccgccgttctccagaaaggtgttatccccggtggccagttcgtacatccaggcggcataggcaatgtccgccgtaatatgatgctccttaataccggcccacacctgggccgccttaccggtgagaatatccatactggcaaaaagaggtgtttcctccctcccgctctccgcgctttcccagggaaacataaggccgcagtaacccttttttccggcatttctccgggcacgctccatgcggttcatccggtactccagcagctgctttgccttcatgggagagttgaaaaggtaatatggaagaataaatacttccgtgtcccagaacacatgccctttgtagccctcccccgtcagtcccttggctgcaatggaacttctgctgtccgggggaatcatgcccagcagatgatactgggcaaaccgcagcgccagctggattcgcggatgctctgtttttaccctgacatcatgctccttccagtacgccccataggccttcgcactttcctcatacagcctgtcataccctttttccaccaggttctcaaggtgttccagtaccagacctcttccctgctcctcatcctgctctgccagatctcggctggtgtagagaactgccagcttttcataacagccctttgcacctttttccacctgaaaccttacagtctccaggattcttcttctctgcatgccaaagcttctgtcttccggggctgccccggtgattttagagccgcagcagtgatacagggtcaaattgctctgggttgtcgtctgatccagatacaggtactgccgatccaaaacctttttcgtcccgtcattaaagtgctggacaccggaattggtcatcctggcgttgattcccgatacgatctcaatgtctgcctctccgtccaacgggcagatctctgccttcagcccataggcatgcacattggctctggatacagtacggcagaatctaagctcgtagcgtctgccctttggggattcccactgcagctgccttatcagttctcctgtatacaggttcagtctccgggaataaccggtgaccttgcctgtggtcattgaaaacaactctccgtctaaagtgataagcatttcgcaggtgtccgccccgttaggcaattctacagtctcattgtgactgctgttaaagcatccgctcacaaataagcctctggtctggaatggataaggctcttcgtgggcagagcggattcccatatatccgttagccaggcagaagatactctctccctttccctgatgtctcagacagaattcatcctctcccagaatccagtccttatagttcccttcgcctgtcgtatacgttaacacggcacacctcctatagttccaccacttttcctgtctcggcggaacgatagagggcctcaatgattctcatcagggtcactccctgttctgccgttatcaggggctggtcattctccgcacagcatctgataaagttactgatactgatgtttcttttatcaatttcctgaacaaaagggagttttgtatctgtcagattctcattcttttccccgtagatctccccctgaaatacagaggcaccggccaaatcaccgaagatctccacattcattttctgcttttccttacagttgagggcaaatgccgcctctatctgaagagatatcccgccttcaaactgaataaatccaaagagtccgtcctccacagtaaacttttccggatcccagcttcccataaggccggctccgcctctcttcccgatccggtccgagctgcttgccgccacatacaccggcctgggatagtccaaaaggtataaggctgtgtccagcatatgcacaccgatatctaccagaggaccgcccccctgcatggccttattagtaaagtttccccagccggggatcccccgccgtctcaccgcctggaccttaccggtatagagggttccgaattctcccccgtcaatcattttcttcatcatctgtacttccggggcatagcggtaatgcaggttataggtgaggatcttacctgcctttctggcttccatggccatccgctctgcctgttcggccgtaagcgccggaggcttttcgcagagcacatgacatcccgcccggagggcgtctacggtcagcggctcatgaaaccggttgggcacacagatcgttaccagatccagctcctctttctccagcatttctttatgggattcatagtaagccggcacctgaaactgctgggccgctttttttgcgttctccagattcacgtcgcacaccgcggcaatttccgcaagctccttattttttaaacagtttggaaagtgagagtgcagagattcctgtccagctcccatgataccaattcttaatttcttcatgaataacctcctgagcctatcacagctttcacatttatagtaattccagccataggatttcccagggcttaagcacatccctctccaccgattccatttgattcaggatatcctttcccccagctttctttggcagtctgactgtatgttccgtcacattaatgagtaccagcaccctctgaccggtgcttttattctccctcagaagcccgaacacggaggaaccgtacgatagaatctcctgtccggcctccggtgagaacgcactctgtccggctcttgcccgaagaagcgcaagatatccccggaatacccggctgcgcagactgtcctctctctgaagctccgcatgcagggcagtaacctctaatttttcccggttgatccttctgggaatctgtgactcctctacaccctcctgccagttctgtgatcccagcagactgtgatagtagatcccgggaacgccctgcatgctcagcataattgcctgtgacgccaggaaccggccggctctcacagaaaggtccgtttcccggggggatgtcaccgcatccagataattaatattcagctcatagggactctgggttttgtccgggttctctttgtaactgatgcgtcctccgtgttctgtcactttgcaaaacagcagctgtttttcctcttcatccaaaatcccgtccacgggtcttacgccgatgccgtcatgggaagccaggaagttaaagaatgctgtgccctccggcagaggggtatccccaagactttttgcccaggcgcttagtcttccggtatccccggaaagcatggtgtagagtaccagaggcggcagggggaactggtataccagatgtgcttcgtctcctgcgccaaagtaactgatgttctccagatgaggaacattcgtctctgttatgatatacgctcccggataaatctgctgaagcatcagccgcatcagcttaatgagcgcgtgtgtctcctccaaatgcatgcaggttgtacccggctttttccaggcaaacccaatggcatccagccggataaacctggctcccctggaagcatacagaagaagcacctccataatttcacagagaagataaggacagccgaagttcaaatcaatctgatccccggagaaggtagtccagaaccatttctttccctgaacagtgtcaaaaggtgtgagaagaggcagcgcccttggacgggtgactttagaatagtcctcccggggatcgcattcaatataatagtccgtatagggcgcttctccggcacagcatttctgaaaccagatatgagactttgaggtatggttgatcactgcgtccagcataatccccgtatgctctccaagggactccacctcttcccatgttccaatctctggtgctatcctggtataatctgatactgagaatccgtcgtcggaggtataaggaaataccggaagcaggtggacattggtgatttcgtccggacagttctctttcaaaaagtgatccaatacctccagtggatcctttccttcttctcttaaagcatctccataggtaatcagcatacagtccttctgggtcaggggactgccgctgtctttggcaaaaggcctccatttctcatacagttctgcaagaagtttgtctgccagcgtatagtcttctcctgaatacaataccttcagcaattcttcctgtttctctttccaatttttcatacttctctcccgatttcatttttctggcattctcatgtctctgcaaacaggcatagtttccagggctgcagcggtatgacggcacactctgacctcatcctcagcctctccctgagctgcccaggcaactgcattcaccagtatcctctcaatttccggaatgtagtaagtggggtacgtttcatggcccggctgaaaatagaagatcctgcctcttcccctccggtagcagaccccgctgcggaacacctcgccccccgtaaaccagctgataaatactgtctcatcaggacttggaatatcaaaatattccccgtacatctcctccggtgcaaacctcacacagggagggactcctctggtaatagggtgccctgcgcaggctgtccacattagttcctcatcatcgctctctctccacctgagggtgcaggtggtccccatcaggcgtacaaagggcttcgacatatgagcagagtgaagcgggataaaacccattccccggttcaccctctcagcaatccgctctgccgtctcatccggcacctcctgctgggcaatgtgagaccaatataccagcacatctgtattctcaagcacctcccgggacaatccctgttccggatcatccagcagggccaccttcacggaatatccggcagcttcaaagatttccctgagccgtccgtgaattccctccgggtaaacccggtacatatctttggtgctttccttccatcggttttcgttccataccgtaacctgaatactcatctcatcccgcctcttttcctacaaacccgctttctccatacatccccggatgtatgctaccgaatccttatagagtccttcctgatcttcgcccaaaacccggcattcaaaagccatagtcttgtcaaatccaatctcttttaatccttcaaatccatgtacaaaatctgtgtgtccgtcccccggctggaatctgtgactatcagcaatatgcacatggcctacaagatctttccacttgatcagactttttttgatgtcctgctcctcaatgttcatgtggaaaaagtccgccataatctgtacatgcctcagtcccccctcaagaatcaggctgcctgcggcatccagagtgttcagcatatgatcctcatatctgttgaggggctccagcagaatcctggttccggttcgttcgcacacggactccagctgccggagggaatccaaaagcacttttctgtcctcctcagcgcttctgggaggcgtcataggtggcagacgcagggaaaacattccccaggcagcaggcactacaattcccgcagcgcccagttctcctgcccgctccagaataattgtgatatcctggattgcatgctttctttcttcctcctgaaaatccccgatccatccccggtaccctccgcatacggaggtgaccggaatgccggtatcctttaccgcagtcttcagctcgtcaaaacgctccagcagcaggtctccgtctgcctccaggccgtcaaatccaaactcttttatctgaatcagtttttcttccagtacatcagaaaaaaacggtttattttgtgtagcaagctgtatcatcctttttcctcctaaaacttaactcccatcttgatactggactggggctcctgatccacatacttctcatatgctctgtccgcctcagcaaaatctaccacagggaatataatgtcttcacagttcagatatccgttcgtaagcatctcccagcaggcatcctcgattctgtgtctgtcccatctggggtaatccggcagaggctcggagcaggctctggaaaatacaatttttgcattattaaaatgagcctcccttcccagctccagcatcgggaacggcttggcaaatgccacaaaggaaatggttcccccgtatgccaggcccctgagcccgctctgaagcgcagatacatgtccgctggtctcgataattacatcgacccctcttttatgtgtaagctcttttaatctgagtcccacatcctcctgtccgggatccagcgcatagtcagccccgtttttcactgcaatctcccgtctgtgggcaatgggatcaatgacaatcacaggggaagcccccagtcttttgcagatctgggcggcaatctgtccgatggcacccaggccgtagacagcgactgcgtctcccggccgcacgtggccgtctctcactcctcccagtgcgaactgtgcgggatcgtagcatactgcattcttccacagcttcagatccggaagcctgcggcagcggtaattgtccacagccttaataatctgggtctccctgattcctccataggagcagataagatctcccagctcatactctgtcacctggctgcctttttcaattacctctccaacccactggttgcccagattccactctccaaagacaatatccggatcttcgttctcatccctggggacaaataactgccactcgctgtcatagcgttccttcacatgcacgctggatgccctgaactctgtcacctctgttccgtgcttaggcgccgcgtacaggactttacacttaatttcatcctcctgtatgggacggtctgtatattccttaaaccctgctactcttggttcaactgcaactaacattttgctcatagcattcatctccttataaagtcacatatcgttcgtctatcagttttatacatctgtctgccagttcctgaaaactcaccctgccctggcatccgattcttgtcatcagctgccctcccaggggttccttccatttatccggtatagcttcagcgccgtacatcataccaaatgcggagcctgcagtggcgccattgcaatccgtatcaaatcccgcttccaccgcaagcccgatcactctggtatagtcacttcccccatacagcagggagaggcagatgatcatatcattggggattacatgacaccagtcatggagatcctcttctttgtaatttttatgaatccaggcaatcatctcctccggatcctccgtctccccgcacagcttcagaaattccgtcaaagcgctgtacagtctggaagcctggggaatatagtgcatcgccctttcaattgcctccccgggcgtttcacagacagcactctccgcgataagggccgcgcagaaggcggaagcatagatcccgtttttggtatgcgtcacactggcatccttcactgccatccgggcagcttcccggggatttcccgggttcacataggcatatgcatccacccggatctgccctcccagccactcccggtagggattgccgtaggccgctgtctccggagggaggattccattgataatatttttatacgccatgcgctctgccgtacacgtcatgaatactggcacatttgttgtgagaaattctgccacatccataggaacaaattccctgccgtaattctccaggatctgcatccccataaccgtgtaattcatgtcatcatcctcaggtgcgcaggctatgttgttaatccagctgattttaggattcccgtaagccccgggttcatctgctacctgataccgtttgcgaatatccccgctgacatcggaagacatatacccatggataggataattatccgtctccttcagaaatcccagaatcctgtctcttgtccagcattccaccggctgtcccagcaggcacccggcggccctgcccagccaggcacccagaatcttatccctcagcacgtctttttttattgcccggggactgcacgtgggaagaagctccagaatctcttccagtgtctccggctcccggtaagggaaatccgcctttaccggcatctgccttagacgttcataaagccttaaagccctctcctctccactgaccgtgcctttttctttcaggatattctctgcttcctgctctatggaagcatctacatcctttccctcctgcgcgctctgccttaactctgtttctatatattccgcccggcttacatactgtaagcgaatatgttctaatatattttctctcataccttagcccttctctccgccggctgtaagaccgcctgagataaacttttcaacagcggagaacgtgatgattacaggtatcgcagtcagcagagccgctgccatcatacgtccccatacgtaatccatggaaccaaataattgttttaatcctaccgccagcgtcagtttgctctgtgaggacaggaaggtgaatgaaaacagaaagtcattccaggctatcataaacacataaataaatgcagaggagatggccggaacagacagaggcaggataattttataaatgacctgaaatctgctcagcccgtctatcatggccgcctcttccagagatgccggtatggtttcaaagtaccctgacaacatgtaaatagcagcaggcagggtggaaaccagattggcaattacaaccgcccacatgctgtcgttcagtcctatggaggacatgattttaaacagcggcactaccaggaggattcctgaaaacatgtaaacaattaacgttgattccttaaagacaatgcgtcccggaaataccaggcgggcaaggctgtacgctgccatccctccgattacaatggctatggcagccgtagtaaaggcaatcttaaaactgttcaaaaaataccttccgaaggggaatatctcaggattcagtacatctttaaaatgctgaagcgtggtatccttgggaatgatctgagggggaaaagcaaccgctgcctcagaggttttaaaagcggtggtgatcataatgtaaaacggaaaaagagtgaccaccagcactaagatgacaagcacataatgtaatacggacattgcttttttcttctgtttcattttctcaccgcctttcttccaaagaggatcacgaacgcaaatacaatcacaaagagtacaatcgttattgcagccgcccctccgttattgtgtgtggcaaatgccgtctggtacaggtaaactcccagcaccggaacttgtttagtaaacaggtaaatatcatcaaatttatagaaattccatatggttctcagagatatgatggccgcgatggatggaagaagttccgggaaggttatggcccagaacctgtgccaggctgaggcaccgtccatctgcgccgcttcatacagactttcgtccaccgactgcagggccgccaggatcatcaggaacgcatagggaaatactctccaaatgtcataaaggataaccagtaaaacagaatataccggatggtccatccacataggtgcttcttcaaatatgtgcaggatatctacggtgaggtaattcataaccccgtacaaaccgttaaacatatatttccatacatagactgtagctaccataggagctacgtaagacatcagcattaaacttctggcaactcttctgcctttaaactgccggttcattaacagggccaccagcaggcccaccagggtagagcccaaaacagttaccactacataagcaatggttacccccagggatttataaaacgtaggatccgcaaatagcttcgtgtagttctccagccctataaatttgctggggcggttagggttttacgcaactttttggaagcttagtataatgttgtagataattgggtagataattacagctccaatgaggattaccgtgggcagtatcagaagaatgcccaatctgctttctctcttctgcatcgtaccgctgctcttttttatcttttttacagaattctgcatgatttctcctttcaggtaatgaaaacggcacggccagtgtctttctctaccagccgcgccgttcgcagtcactaccaacttacaaattcagcatatactatccggcatcttttactcaacagcagcaacctctgcctcaagatcagcctggcacttctccatagcggcgtctatatcctcaccctgaaccaggatagagttgatgcagtgcggaataataaatttgctggagatattgcccatggccggattcacttctccatccttcacgcctaacatctgcagattctcaaaagcatcgggaatagtggcagctgtatcgccgaatgcttttaatacatcattttccagataggcaggatcatcggctacatccttcaatactggattggaaccgcccggtgacatatggcaccacttgatattcgcttctttatttcccatgtaggagacaaacttaatggcagcttctctctcctcctcggaaatcatattggagatggtcatggttgaagtcataccaaagcttccctgctctgtcttttcaggtaccgcaaatcccacatcgtcagcaagcccctgatctaccagagcgcccataatataagtagagtacagagccatagcggaatgtccgcccacaaatgcgtcttttacttcctctacgccgttggaacctggcatggtgtactgataaagggtcttatagtattccagaatctctttcatctccggagtgttgaactgaggctttccctgctcgtcgaaaagctcgaatccggcagaacctgtgaatgagctgaaactctgctctgtaaagtcagattcctcagtagcgatcataataccgtattttttattggcaggatcgctgaatgcttctgccgctttctgaatattctcccaggtggtgggagcttccagtcctttttcctcaaacatagactttctgtaccagatgcctgacacccagcctgcaaccggcactcccaggtactggtcctgccccggcgctttcgccatctttagaacaccatcgtaaaatctgtctttgccaatggcttctatagcttccgtgttagcttccagatccagggcctcttccccgttcataagccgaagctgatccacaccgccttctaccactgccggaagctttccggtactcattaaagtagatatctttgtccagaagccgtcctcaggaatgggcatctgtgtcaccttgatgccttcgttctcagcctcgaaatcatctatgatctcctgaatcgcctgtacccgctcttcctccggctgtccatgaaggaactgaatctcaactacatccccatcttttttagaatccttgtcgctttttgcagagtcggaacctccgccgcagccagctaagctggtcactgccataaccatcgttaacatcattaccacaagtttcttcttcacgttgctacctccttaatattgtattcctatccatctttttccaaaacgttttcgttaaaagggaaaagaaaaaagatttattacaatctttttttgtttatcattcccagtttttcacgtttcataccaaataccgaaagcgttttcataactgtatattacaacaccctatgaaatttgtaaatattttttttgcagctttctgcgatttgtgaatttcttctaaattcagagcgctatttttaaacacttttccggatcaggagccggtgatccacgtactctatgtagggaacctccttccctgcatgcatatctgccaccattgtaacagctttatatcccatggccttaaagtcctgaaacacagtggtcaagggcggttccatatatgcacccacctgtatgccgtccataccggccaccgcaatctcccccgggatatctcgtttcatctccctaagagccctcattacaccgattgccattaagtccgaagcggcaaatatagcatctatctccggtctctcttttaaaagctcttttgtctcctgatacgccttttcctcaaagaaatccgcatagcggacacttttctgcggaagatccaatttcattttccgcatggcacgtataaaggccgtttccctgatcctgctgatgtccgcctcaaaagaaccgttcaccatggcaattctgcgctttcctctgctgtataagagctcaatcagctcctccaccgcctggtcattattggtccccaccataacgggggccttgtcaacatctatccccacacagggaatgcttaattccgacagctgtctgtagtaaggatctgtggacttaaggccgtataccacggcgctgcccatattcttttccttacacagatcccggaagctcttttcctcctgcttcttcttattgatgaacaggataatcagctcatagcctctctcctcacatccggcctgggcccccagcagcaggcggtagataatgttaccattcatatctgtctctttcacgtctgagaatataaacccaattacactggagcgcttcagggccagattccgtgccgaggggttgggggaatagtggagttcttcacagatttccagaatgcgtttttttgttctgggacttacatccgcgtaattgttcagcgccctggagaccgttgtaatactaacccctgcgcggttcgctacatcttttattgaagccatagttcctcctcaaattgttctcacaaattttccaaaagctcttgacgaaaacgtttttgtatcatataactactatataccaaatagaaatcgttttcaatatttttttccttttccatatgtcattacaactgtataaggaggtttccatgactaacagagcattagtccatgccattatggactatcagccattcgacagagtcccggtagtcagctttggcttttggacggaaacattaagaaaatggcgggatgaagggcatatcgcttctgagctggtatatgaccgtcccatggccgatattgaatacgatacaatcaattctatgctgggttttgactttaactggcattccttaagggggatgtcacagtatctgatccagcccctttttgattccgttatcctgaaggaatatcctgacggaaagcagaaaacactggatgtggagggcaatattgttatcacaaagcctggaactgcgtctttgccttatgaatccggccacacactggcagatcggaaaagctgggagaaattttatgtcccccgtctctcttaccacgaccaatttttagataaagacctgctgaaaaagctggcggacgagaatgaatccagggaaaaccctctgggtcttttctgtggatctatgttcggaagaatccgcaactggctgggtctggagaactttatttttctatggtatgacgacccggatctgttccgggatattgtggataccgtaggagatctgctttaccgtcagacaaagctttatctcgaatctggtgtaaaatttgactacgctcatttctgggaggatatctgcggaaataacggtcccctgatacagccggaactccttcgggatctggcagggccccactaccgcagaattactaatcttctgaaagaatatggcattcatattgtctccgtagactgtgacggtcaaatcgatcctatgatacccatctggctggacaacggggtaaataccatgttccccatagagattggttcctggaatgcctgcattgctccatggaggcagacatacggccgtgagctccggggtgtgggcggtgtggacaagcggatcttcggtcaggattatgccgccattgacagagaaattgaacgtatccgcccctttattcagcttggtggatatattccctgtccggatcaccggatccctcctgatgccaaatgggaaaatgtccagtactactgtgataaactccatacccttaccgtgtagaaaggaatcattgaaaaaactatgaaaaaagaaaatagaaagattcagggcgccatctttgatttggatggggttctggttgatactgccaaataccactatcttgcctggaaacgcctggctgccgagctgggttttgactttacagagaaagacaatgaagcacttaaaggtgtcagccgcatggcctccctcgagcttctcctaaaagcaggaggcttgacgttcagcagtgcgcaaaaggaagagctggccgccaaaaagaatgcttggtatgttgaatatctccagcagattaccgaggatgaagttctttattatgtgacagataccctaacccgcctgagacagcgggggataggacttgccattggatccgcaagtaaaaatacccctctgattttggagaagacaaaactggccccgtattttgatgtgatcattgacggtaactgcacttcaaaggcaaagccggatccggaggtctttcttcttggcgccaaagggcttgggtatcccggagaggaatgtatggtttttgaggattccgaagcaggtatccaggcggccaatgccggagggatgttaagcatttatcttggcacatcctcctgtgcggatgcggatcttaccatttcagacctctcagaattctgggagacagatattatgcaaacaatccatactgtctcctaaatctcctgctatcccaaaaatttagatttgaaggacatcacatggccctgcaggagccgtgtggtctccttctcatcccttttttctatactgcggataatatctccgtattcccttacaacggtatcatcaatgcttcccatatattctctgtttacaaacagctgccttacgcataagtccagcgttatattcatctgtgtctccaggtattcattccgggtaattttggatactgcacgatgaaactcccgccccagcagaatccgcttttcgggtatggtttcagctctggttttatcagcaatgctgcgcagttcccgaagttcatccccggttcttctggccgcggccagacggcccaccagcgcggaaagggtatatcgcagctgacagatggattccagatcccggacggataattcgctgacaatcatgcactgccttggaataatacagattagcttttcccaggataggcgtttcagcgcctccctgacaggtgtccttcccacatttatctgctccgtcagacggggttcgatgatcacctcccccggcttcagttcacaggtaatcagcattttctttattttttcgtatgcaatgtcactgtctctcatacacacctatccttctctctttttatgataaaggcaacgtactttaattatagttggtaaacttttccaaggcaagaacattcccggctgctgctatctcccaaaccttaacggcctgttaaatttacattccagcgctggtatagtataataacccttagaacttagattaaggagtgaatgcctatgtttgaaaacgattatattatgcggatgatacatgatctggcccgggctttggccaaggttctctttcataaagattctgtgatgtacgaactgccggaagaagcagaattcacggctgcggatgacctgtactgcagaatccaggcgcttctctctcaggggaagattaacgaggcggagaatatgctcctggacgagatggattcctccgacaagcggtaccaggaggttgcccttgacttttatatgaaattgaatcagttgagtgacgactatctggaagcccacaactataccagggaggagatccggcaggggctgaaggatttagctgacacagctggtgttcccatattttaattctgcatcattctgtgaaaatacttcttgaccttggagctgctccaaggtttattctttatacaaggaagtgataatcctatgaaatacaacgaaaatcattcattgctgaaaatcggagaggtggcaaaattaaatcatatttctgcagacaccctccgctattatgataagatagatctgtttaagcccgcggttactgatgataatgggtaccggtactatgaggttaagcagctggttgatctggatctgattctgtggctccgcatgaatggagcgtcggttcatgaaatccgccagatccttgaaatcaagtcactggataaagtcattgatgtattgtccagtgagaatataaaactgagagatcagattcaaaaaatgcagaatcaactgtatgccaaccgttattacatttcacatatgaaaaaatgtatggagtgggaggtaaacgaatgctaccttctggagtttgaaaaccgctactgtgtatccactgattactctgtctctcccggcagccggagtgagtatgagctgggattaaaaaatatactgcagcgcattaacgataaggactcttattttaattctttcttcggaggtatctaccgccgtaaaaaagaaagcccagactataaaagtgaattatatcccgctgttgtaaacatccgcaatcacagggcatccgaaagccagctgattccaaaagggatctatggcgtaatgcccttgcggggatattttgactatgcctatgatatgatcccaaaactgctggccttcattcataaagaaggttttatctccagcggggattgttatgtactgaaaatatgggaacagggcagaacagcttccccatctggagagatgctggaactgcagattcccgttctgaaacgttctgtttaattattttctgcagtcctgtaccgtctggattctgctgtaaaccaaagcttccggtgatgtttcccacagcctttgggatgtggataaacatataatttatcctacaaggaggtttatcttatggcaaaattcagttttaagcgtatgcctgcatatcaggtgcttacgcagcaggaaatcttacaaatccacgaaaaagctttagaacttctggaaaccacaggtgtcaaatttgagcaccctgccgttctggaggaattgggccgcagagggtgtgaggcggacctgaaaaatatggttctgcgcattccccggaaggtggcagaggatgccgttttgtctgcaccggagcattttgtaatgtataacagagacggtgaagccaccctccggcttggagaggggcactcctattacgcccccggcccgggggcacccaatattgcaggctctgcctttccgcggcgctttgggacctctgaggacttaaaagaggctctgagaatcacagaatcctcccccggctatcagatctcttcaggctctgtggtaccgggagatacccccagtattattactgatgtctatatcctgtatcaaatgatcctgcattcaagaaaaacacttttagccgaggcatgggaagaatcctctgtcaaacgcgtgggaaaacttttggaagccgtctgcggaaccaaagagctggtcagggaaaaaccctttgttcttctggccgcctgcccgtcacctcccatgcgctgggaaaaacgtgtcattgataacgcccttgactccatggagtacgggattcccctgtttctctccccatcccccgtgatgggtgtatcctgtcccgttaccatcgccggctctgtgttaacacatacagtagaatctctgtcttttctcacctttattcagctgatgcaccccggacataaagtattatacggaggcattcccggggttatggatatgagaagcacgtactgctcttcctcctccatagaaccctgtctgtctactgcggcatacgcctgcatgggccgttattacggacttcccactctggccttccttgcccagaccgatgcaaaggaaagtgattatcaggctggatttgagactgccatggatcttatgaccggcaccctggcaggcattgatgtggtcttcgggggaggcaccctggacagctatctctgtaccagcaatgaaaaacttgccatggacggacaatttttccggtactgccgccgcctgcaggagggaattctggtaaatgaggaaacccttgcccaagacgagatccgggaaatcaactggggggaagacggtgtgtttctggaactggagcacacggcagactggtaccaaaaggagcagtgtatgctggacagcattgcagataaagtgaattacgagcagtcccattccgaatgtgcgtccatcacacagcgcgcctgcacttcaatgcagtcagccctctcccatcccctggaagcagaacgggccaaatgcgtccaaaaggcgttctgtgaaattgcagagtcactggaggtagacccatcgggactcctctgaactgactaacccctagaaaggagctttgttatgaataaagaaaaacggcgatctctctatctaaaacttacaattctgttgtccggcggtgtcatgatggcagatctggcagtatatcctgcagcggaaaaaatatttgaagcttttcccaaaaccaatacaggattgctgaattttattctcaccggaccgtccctgatacttatcttctcctctgtcctgtgcggtgtcatggctcagtatataggcaaaaaagctctgatatccggtgcctacgtcctttttacactcagctctctggcctgtgtctttgctgacgcccctgctctgctggcggtaatgcgggctctgatgggggttgccatgggctttatcgggacagctatggtaggtcttatcgcagagctttacatggatgaaaacgcaagaagctctgtcctgggatactataacggcattatggcggggatgggggcacttttttccctgggtgcaggatatctggcacttaaaaactggcattttgtgtttcttgtatttctggttatgatccctgtcacccttgctgtcattgccttcatccctcagacagagcccgaaggaaagaaggactcccggggcgcctcccgggagaccgtcccctataaaaatgtcctggcactggccggagctgcctttgtagtgaatgccatgtatgcagtcattctcacccaggtatctgttatagtcacagaactggggatcggcaacgcatctactgcgggggtgatgggatctctcggcaccataggaagtctgtgtgcctgtctggcctttgggcgtatctacgataagtgcaagaactttattccggttatttttaccattgttatggcccttgggtatacaggactattcttctcccgaaatatcctgttggtaggtctgatgtgtggcattcttggaacaatgtacggactcagcttctcttattacctcatgtatgcctctgtcattgttcctccctccaaagcgtccctctccatctctattgccaatgcagctgtttatctgggcatctttgcaggaccctatgtccctcttgtctatcagcgggtgttttccagatccactattgttgatgtcctgccatatatgattgggacactggccgtctgcggcaccatttccgcagtcctgtctgtaagacggaagcatactcttacatgagagagagcctgtgggggacaggtgtaagtgctgtcccccacaggctcctacttatctctttactgtacgcccgccatctttttcagacttttgaccgtaaattcatcatctgtctccccatgaattccatgttctttggccagctcctctgtatagtcctcaagcttatatactcccattgcctttctgggttcatcgtagtgcatgaccagaggcgtaagtccgtaatcctcaatccatactttgccgctcgcgggatccttcttcacagtaatacgggccattcctcccagaagtccttttatgtccttctgcagcgacgcaaaatttcccagagaataatagacaagcatctcatgcccgtctccttcttttctcatctcatacccctgaagtacatggggatgtgttccaataattatgtcaaccccctgctcccccagaaattttacccactcctgtaccgattcatccggttcgtcagaatattctgttcccgcatggaggaaaaacactaccaaatctcccatttccccagcctctttaacctttgccgccgccttctccctctccagaatatccagaaggcaggtatctttggacagagtgtccccatttactccataggtatagttcagcatggctactttaaagttttttacctccgccacccgtatagaggaatccccctcctcatcgtggatccccaagactgacacctggggataattctttttccagaatcctgcggtgtccagtattccctgctttcccctgtcataggcgtggttagacgcgtgctccacgacccggaaccctgtggaaaccagggcatctcccacagcaaacgggcttccgaaatcgggatatcctccaacctcatcctcatccccgataaagatagtctcctgattcactgccgcgagatccgccttctgaatctcgtctttcatgtgggtatacagaaagttaaagtcccaggaattgtcaccttgtctggcctcctccaggatctggtcatgcatgatattatctcccacagcaactatcctgagtgtattttcttcttccagagccagctgctcctcccgttccttctccatctgctcttcttttgcttttgcggcagcctcctctgctttcaccctttttctatgtatggagagagacaggatagctgcgataacggccagcagtagtattcccatgccagccagccgcagccgcattctctttacctgtctctctcttattttttgacgtctgaggcgttcctgccttcttttgacctcctcgtccattctccctccccctcctgctttttctttcattataacaaaagcaggcagaatgagacaatagaatcgtcattttatgctattattttagaaaaacatactcatagcctgtggaataatccgggcaatactcatatcccagccctgtaaactcctttacatcctccagatcctccacataggtctctgccatccagcgcaccatctccccccttgccatcttagcctgggttgcctttacctttacaatactctgggacagttccccgaagatacaggaaatataccggatgcttttcccgggatatctgcccagataccgctccacagtcttgctgtattctttggaggccagattcaaaatctcatcctcgccactggtcagttccctgaagatcttgtccccccagaactcgtacagattgtgtttcccatctgcatgcagtctggcctgcatctccaggcggtaaggcgccaccccatccataggcctgagcaccccgtacagtccggaaataatccggagatagtgatttgcataatcccactgcttgtttgtaaacacctgaggcgccatatattgatattgaattccctcgtatgccagcagtgcaggggtattccgtctgactgactcccagtttttcagtctctcatagttcagctgtgcaatcttatcattgcagcaccacagtgtcttcagttcttcatagctcatctgcctcagacaatgaaaaagcacctccatctcttcctgaaacacaggccgctggtctgtattcatcacatcatcacacaggttcatcttctttgccggagaaataataattttcatacctatcccactcctcatgtaaatccgactgccgggttgctattttctcttgtaactccattttaaagttatagtaccatatttcatcccagagttacaactgccgttcagggtaacctttttgacgtttatgacaaaaaaaggggaaaaatatacccccggggaggaagcatcttcttcctccccgggggtatttctatggtttcatgattcaacaaagataaacctgataaggtgtagaccgtcaacatttccataccggaattctacatgctcaattcccctggccttcatgtagtactgactcagtttgtccaggctctcctctgtgaacagatccgcggcagcagcctcatagcttccctggtcggcaaacttcatcatcatatcagatgcgccctcatcgattttgcccgcacagtactcgtatatctgaccggaatcgtaggaggtgaaataatcacccgtcagctcatagtaattgtaggctcctgactggcagaccggaagctgaaaatccccgtccggactgcagatgctctcatattcctggggaacagggcagagataatcatataaaatgatgccgttcaggattccctgggtgtccccctctgtctgggaggatgcgctgtccggatccccgtaggtggcatccacatagtaatactcaccctctatctctacaatattccacgcatgtccgatattcgtctccagagaagttccctgtacataaatacatggaattccgattttgtccagaaggtatttgacagaggccgcataaccagcgcacacggactggttattctgaaatacacttacaatattctgatcatcctgtgagtccagatactgtgtagtatttataatatattcgtaaacggcctttaccatatcataggaagatccgcctccggcagcaatctcctcagccacggcatctgccttcccctctatctgcgtctgtatctccccggcctcttcccgggttctctcataattaggctcaaagacagcatagtcatcgtagagggtcgtgtaataggtagaggcattcttcacccagaaaagctccatccggtcacacagcagtgcgctgtacgctctgtctatgatatccttgtcaccgctggcgacctccacttctccctgaaactcctgaatgccttttaaaagctgcctgtagattcccttttcctcttctgcaagctgattatagtagtaaccggaatggatctcctccgtctcttccgggatctcaccgccatgctgtggttccccggagataagatccccaatgacagattttccttcttctttagaatgacatccggcggcggccaggacaactgtcatacatactactgcggcccattttccatattttttcatttacctgctctcttttcttcatattctaaaaaagtactcccgggagcagccggacaggcttgctcctctgcctattttatcatatgggagcaggtttgcaaattttaatttctgatccttatcactctctcagtctttctacaatgcttatcctgttcaccctccggtacataagtacaggaatggccacagccagaattgccatgaagggcagcaccagcgccaccggcagcagggtaaagtcatatacaaaccagcgcagggttctgctaaggggtctgagaataagaagacttaccaggcttcccaccgccgagctgataagaccgataaagatgacataatacaacccttcgaaaatgagcatcttctgctgctgccggtctgtcataccgatacttttcatcatagccagttctttcctcctggtaataatccctgtcagtgttgagtttacataattcagtatgcctactgcacccactacaacgcacagggcgccgccgatgagcttcagcacctccatcatctgcataaactctttcctgagctcttttcgggatctgtagtctgtctgaggatttatctgagtagtatatttctcaacggcagcttccgctgtgtccaggtgttcttcccctattcggaagcatgccagatatctctggaacccattgacggcagcagtccgttccaactcttctttaggtacgatcatagagatttcaggggctcccgcggccagacctgcgacaccctcccccagctctacaacagccatgacttcatattcatcccacggaagttctctgacccccctggcagatacgattccggaagtgtccaccggatttccataggcatcatagatttcttcctgtctcttgtcatactgttcccgggtgtcatacctgcaaagctttaccttatccccgggatgataccagctctcgttcttattattaatatccatctgggcaactgcgagaacatatcccccctcattgaatttctcaatatccagttctccctctgtcacatgaagctgcttcagaatatacgggtcaaaggcaaaccgccgttccgtcataatcctgtcctgagtcagcacatcttcataagttttcctgaaatcagcaatggagtcctttaaaaaccccctttccatcccctggcggagacgttctttacctgtctcgtccatgggaaacggaaaaaatgatacatatgcgcttccgctctcctcaaccccgtccatatcatttacagtgtcaaaaaattcctccggcagctcaatatctcctgtcccatagttatggaaatagtctgtggttcctatattgagatccccgtatatcatttcatccatatatttgtctatgctgaagcctctgactgcggaatatattgtcaggagcaggataattccaagggacagtgatgtgataactacaaccgcttttttcttataccggaacacattggccagggccatccggctgatttttcccctgtgagaggctgctttttgttttttcttttttcccttgtcacattctacatatttaacagcctccacaggcgatacacaggctgccgcttttcccggtctgcggcagctgatcagcacggtaatcaatgagaatatggctgctcccataaatattacagggtttgctgtaaaaccatctccatagactccggaaaccataccaagcatcacaggagtaagcttaatccccagcagccaccccagaatcaggcctgccgggatccctgcggcagagagtataagggcttgcctgcgcaccaggaaacgaatctgctttctggtagcccccagagtctttaacagcccgtaaaatcggatatccataacaatggatatctgaaaaatattatagattaccagatatccggtaattccaatcaataccagtataaaaactacacccagcacggtctgtacgtccatgctctctgccttggcagacagataagcccagtttaccccaatgtcaatttcattgtctgcaaacccgcattccatgagtaccttacgggcattttcttctatatttctgctgcttttaaaaaaaacctctgcctggatcagcccttctcccagacttttcccggaccgcagcatttcttttctctcagattcgtcaacggaggctatcacttcctccacatattcctttgacagatatagctgacttgctcccagcatgggatctccctggtagattcccgacaccgtaaaggtgtctctgtgcttatgccccagataatcaaattccagggtaatcttttgccccagttctctgggtacgcccattaaatccagcacaatggtatctgccagaatctcctttttattcctgggatacgtccccttctccggcttgcggaatccccactccagatcttccggctccccataacgaatctctgtctggcgtttagccagcgtctcattagacgccatccccaccaggatattatagcttatctcctttattctggaatttgtccggattttgtcatattctgcccgggtaaggtctttataacccgcatgggcgctggttcctacctgacgcatgatctccttttccatggaagatatcagacccatggccaaggtaaatacagtggtaaagagaacggttgtcagtacaatggctgtcacggcgaacaggtttctcatcctgctgtttctgaggcttgccatggagagcttttttaccgccttctggttattattcttcaccttctccgccaccttcctctcttctgcggacaggccctctgtttctggtatcccccgccagctttccgtcttctatatggagtacccgtccgcatagctgtgcaatcgcctcgttgtgggtaatcataataatggtctggcggtatcgctccccactcagtttcagaagtcccatcacttcagtggtcgtcctggaatccagattccccgtgggttcatcggctaaaagaatcgccggttttgacgccagagctctcgctatggcgactctctgctgctgccctccggacagctgccccggcagtgcatacattttatctgtcagcccaagactctcgataatatcctcaataaatgccctgtctgcctcccctccatccagctctacaggcagagttatgttatcataaacgtttaagataggaactaggttataatcctgaaatacaaatccgatattacgccgcctgaaaattgtgagctgattatcattcaggcgggagaattccaccccgcggatactcacccctccgctggtagggtagtccagtccccccagcatatttagcagtgtagacttaccgctcccggaggtccctataacggccacaaattctccttcctccaccgtaagatccaccccgtccagagcttttaccgtattatttccctgttgatagtattttttcagctgtctggctgttaaaattggcataaaaaagtcctcctcttattctatctgcctttagtataagagaaggaccttacatccttatgacattaaaaagtaattttatgacgatcctgtaagaaatccacgggaagcatcacgtgaaagcagcttcctgtgcctggctgggactgtacggctgcataccctttttctttggagagaatcagttgggtcagatacaggcccaggccagagccagggactttctctccatttttacctctgtaaaatctctgaaaaataagattatattcatcctgggagattcccgggccttcatcctgaatctctatatccacatagagctccagtacatttacccttatcacaatggccgaacctctgggagaatactttacagcattctccagtatatttcccagggcttccaccgtccatttccggttatgccagacctgtatctctggaaattcctgaacctgaatttcaatctgtttttctcctgccgccgcaaatacagaggcaacgctgtctgcaaccgtctgtttcagcccttcccaggcgggagtgaaggagaccgccccagtctcaagacgggaaatcttcaccagctgggccaaaagccactgtatcttttccgtctgctcccggatacggtggagaaactccaggcgttccccctccgttaaggagggatcctccagcagctctgtgcacattttaatattggaaagaggtgtcttcagctggtgggagatatctccgatcataccttttactgcctctttttcctcctctgcctcccggctggcatgcagaagctgcccggacagtttcacgctgagggacaccagcttatcctctctggtgtcccccaatatctcactgtaatctacgtttttccggttcaggatgtcctgcagaactttttctgtttttgtataggacctctccagttttcttctgtaccctgccaggagaataccccctgccagaagaaggagtagtgagatcccgatccatacacccccgttcattctttttcaccgtggaacaggtaccccattccatgaaccgttttaatatagaagggatttaccggatcatcctcgattttttttctgagccgcgagatagttaccggcagggtattctcttccacaaagtttcctttctgatcccataggatatccatgatttgttcttttaaaagcactcgttctctgttttccataaaatatttcagcaggcggaattcctgtgtagtcagaccgatctctcctgtccccttaaacaccttcactctctgcgggtccagcgtaagatccccgcagtacagcgtcttctccctctccccgccctgatgctttctgagggcggtctgtatccgaaccttcaataccgcaagggaaaacggcttcttaatgtaatcatctgccccggactccagaccgataatctcatcggtttccatatcccgggctgtgagcataataatgggaatctgcgactcttttctgatgcggcagcacagcttgaggccgtctccgtccggaaggttcagatccagtactatgagatccggctgcttttcccggtacagctcacaggcctgtttcacagtatctgccccccagacctgataaccctccctttccagggtaaaacatatcccccggttcagccctgcgtcgtcctcaatcaccagaatcccatacatatcatgtacctcctaacgttagctacttctacctgtattttattccgaaaaacggattctttcaatcatactttgtctcctgaagtttttcatgataagataagtaagcaacagctgtatcacaagtaccacagcaataagcactatggtctgaactgccggataatggtaactgataattcccagcagtccgtctttcttcgcatagaggaaggtcagatatcccagcagatttcccagacccagagagaggataagcgtacctgcggtgtaaaaagccccttccatctggagcatccgtaccagctgacgttccgagaggcctatggcctgcataatcccaagttctcttcttctcacataaatgctgttgatcatggtgttgatgagattcataatcccaactccccccagaactgccataaagacatagcagagctgtgatgtaaagccggcattttttgttctctccgccagctcctcctcaaaggttctcatctttaggttttgatcctcctcggtgacagcacggagctgctcttccaccgctttaacttccttatccccggcagcaatagaccagtaataatccatagaaagtccgcagatatcgtctaacacggctttgggcagcacaaaggagttgtaatgattgagcccgttgggcatatccgctaccgccgcgatggtaaattccttttcaaccgtcttgtctcccgcctccaggatcatgtgaaccgtatcccctgttctgaattccggcgcccagtgccacatgctctgatccatcacgattttatcgccctgcagcaaatcctcataggtgcaggagccttctatgatacttttttccatctcccgggcgtatgtctccgggatacccacgattccagtttgccagtactcttcaccatccatgagatctttcagctctgcgtcggtggagctggaccttgttatctgctctacccccggaatgctcataatatgattctctaattcttcgttgagaggattgttctggctgatcaccgaccactccttctccgggtgcattttatctccgctgctgctgtccacggacagcacaaactcatcgaacatgctggcctgggctatctcctttggatccgcacaggacaggacagtggctatgaccataaacaggattcctgtcagacttaaggtgatgatcgtaatagcagaccgcttcttgttacgggaaagattggcccctgtgagatgaatcagattcatctcttcatgtccttttctcttcttcttcctggttttgatgctcccgtcatagcgcatagcctctacgggggagattttggcagcaatatgcatagggcgtatgagggaaagggctacagtggcaagggcgatacctgccgcagccagataaatccagggctttagtatggcaacctcgttgctctctatcagctgtcttgtaatgttccccagagcatctccctccccgaacgcattcagaagatacttaaatcccagtttagacgcgatgcttcccgccaaaagtcccaccgggacagcaatacaggctaccagcattccttcccggaacacaatctggcgtatctgtcgctttgtggcccccagagcctttatcttgccgtattcctgtactttataaatcatagaaatatagtaaatactgtatatggtcatgattccggccagaaccactacaagaaggatgcccacgattcctgagtaaaatgctggatccacataattagccatcaggtagctgctgttgtccgctatgtccccctccggaatccccagctctgccgcgactttcccgtatgcgttttcaatctgatccctggtcatagaatctgctccctggatccggaacattactctgtatttcctggagtccccgggctgctcctgttccataaactctttggaaaccagagcggaatacatctttgcctctttttgttcctctgaggtgggaagcagtccggtaatctggaattcccccttttcctcatagccaagtccgccctgctcgataggctgatagggcagtgtaatcgtatctccaatacccgccgtaatgcctaaagcctccagaagtccctgtgacacagcaatctcatttcctcttttcggaaactcccccgcctccagttccatcttgcccagcttcagggccgtatcatccatatataccatcatacctgttccgtccggaaccggaatctgggccggatcctgccggagtcccatggtctctatctctccccggtaggacaattcctctatggtcttaagatccacatcccggaacatagcgtgaaacgtaggataatatttattgatggcagccatctgggtatctactgttccaagtccaaccgtgggaattacaaagattaaaatggtcgtcagaaaaattgcgatccctgtcagcatatttttacccttgttctgcttcaggttggacagtgcggttctgtttactgtactcattggctcaccaccttaccgtcctcaattacaagaatcctgtctgccatctgggctatggtctcgtcatgggtaatcataaccaatgtctgaccatattcatttacacaggcctttaaaagggaaatcacttccatctctgtcttagaatccagattcccggtaggttcatccgccagtataatggcaggcttggctgccagcgcccgggcgatggcgactctctgctgctggccgccggacagtgtgttgggaagggatttgagcttatccgcgatcccgatgcgctctgccagatccaggacaaagcttttgtctgcctttttcttatccagccccatgggcagtacaatgttctcccacacgttcagtgaggggatcaggttatagttctgaaatataaacccgatcttcctcctacggaagactgccagctgctcatctttcagatgaaatacattcttcccctcaatgagtaccttcccgctgtccggacggtccagagcgcccagcatatgcagaagcgtacttttgccggatccggagcgtcctactatggctgtgaattcccctctctgtatatccatactagtatggtcaatggccttcaccaggttatccccgctgccgtaatatttacacaaatcaactgtttccaataacatagcactcataaacaattctccttttctgttattctctcttcatattactctgtgattcttacaacagcatatcgggaaaaataacagaattgtaagataagagtccgccaagccggacccgcgcgccggaaagttacttctgtgctctgtacggggttttggaaagagaaatctggaagatgcttcccctttttcctttcctgatgcggatgcttcccccctgttcctccaggatctttcttgtcaggtacaggcccaccccggacccctctgtgtcctgcacctctgcattgtctccccggtaaaaccgctgaaacacctgatgcatctcttcttttggaatccctatgccctgatcttctatttcaatcagactgcagctgatcatagaggacacacgaagctccacttctgttcccggccgggagtactttaccgcattgtccagtacatttaccagtgcttcctgggtccatttgggatcctgaaagatcttctcgtcttcaaattcgttcacagagattgtgatattcttttcaaacgccttcatatagacactgttcaccgcaccccggatggtttttttcaggctctccattttcccctccacccggatcatgttagtctccagacgggaaatctggagaagggctttggtcagattctccagcttgttcacctcatgaattccctgccttaaaaacgtctgctgctcctcttctgtaaagcttccgctgtctgcgatttcatagcacatcttcagggatgccagcggggttttcagctgatgggaaatatcagttaccagtgtcttagtttttgcctcttcccttgccattctctcccgcagtatctgattttcttccccaatttcagccagcttatcctccagatcaaagattcttatatcagccagatgccttctcttttgctggtaaaagataagaaaccccgtcaaaagggtaaaaaacagcataagacagatcagcaccggcaaaaaggcggcaagagacggggacagcgtacggaacctttctgtatatccatatttgtcccgtgcctcacggcccgcacgtaaagcacgctcccgatccacactatttttccccagaaaagcggcagtatattctccttctgtgtctggtttcagcagaatacactgtcccagcttctccagttcctctgtatgtaccgtatccatccatccaacggcagccagtgcccctcccagcagtataagaaagagcagccctataaacagaactactcttttatgacttcttttgtccatatatatcccattccccttacattctgtatgccatcgtcttctaattttcccttgaggcggctgatattaaccggcactgtgttgtcatccacaaactgcccgtcaacatcccacacagcctccgcgatctgttctctggacagaatctgtttgggattctccaggaagaaaatcagaagctgcatttcctttttgcttaggggaatctgcttctgtcccctccacgccttcattttctgaagagatacgcggatctccccgctgttcaggtaagctgtctccgccacctccacccgcttcatgagcgcatgcaccttggagacaagcaccataaggctgaagggcttggtcatataatcgtccgcccccgcatcatagccgttcacaatatccatctcctggtccagagcggtcagaaagataaggtgcacaccgctggtttttctgagcctgcagcaaaaatcaatgccattcccgtcttccagtgtaatgtcgctgataatcagctggaccatgttctgttccatcagctcttccgcctgggatacgccgaacgcggaaagaacgtgatacccttccttttccagccgcatagtaatcccacggttcagattcttatcgtcctccagaagcagtattgttttcttcacctgaactctcccttcctattgatagtctgattatagaataccggaagcggaattgtcaacgatcccttccgggcatagttttcctatactacccggcgcatagggagatcgttattcaccccttttgagacaaggatctgatggaggtctatgattccattgtggaaggttgctgcgcaggaatccagataaagttcccacattctggtgaactcctcccccatcatatccataatctcatctctgcgggctgtaaaattatctctccagcagagaagagtcctgttataatggcgtctcagactctcgatatccagggtataaaaattatagtccggaaggaggtttacaagctcgcgaaggctgggcaccgttccgcccgggaagatatatttgcggatccaggggtctccggggtgctctttctgtgcagtaatgcagtgcagaagaaagagtccctggggtttcaggactgcgtccacattcttcataaaggtctggtaattgtctctgcccacatgctctatcattcccacgcttactgcccggtcaaaggccatgccgcttttctccagttccctgtagtccataaccttcacttccagggaatcttccattcccgcctgctttgcacgagtctcaaactccttcgcctgttctgtactcagggtgatgcccaccccctttaccttatactttttcactgcctccattaaaagaaatccccagccgcagccgatatccagcagcgtctgtccttcctgcagctgcagcttatccagaatatggtgtaccttattcacttgcgcctcatacagagtattcgatgcctccttaaaatacccgcaggaatagctcatcgtttcgtccagccacagcttataaaaatcattgcctatgtcataatggctggtaacttcctttgcctggtttttcttactgctggaggtaaagagtagcttgtgcagtacggacttattagttgtgaatttacccatctgtcccataaacttatccaggacctcataaagatcgccctccacttccaaatccttatgcatgtaagcctctcccaacgccagagacgtgctggttaataactccttcttactgagaggtttattcaaagttactgtgaattccggtgtacctttgccgacagtagtcgtctcctcatctgtcttcagcacaaatgtgcagggaataatatttcccaggtattcagttaaaaagctgtctgtcttcatcgtcatacttcctttccatcagaacaaatatagctatagttttccccaataaattattttcagacccccttttcaacagatcaaagcaggcgagtccgatcccccctggaatcagacccgccatttgtatctcctaattcttcatcatccctgccaatacctgattgacagccttaccgtcagcttttcccttcaccttcggcatcagctccttcataatcctgcctttatcctttgctgtaggagcctcaatcccaagaccggacagaacttccccaatcacagccttaatctcctcttcccccatcatcttaggcgcaaactcctcatagacagcgatcctcagcctgcattcctcaataatatcccccctgtcttccggggtcatctccagagtctcctttgtctgcttaatttcctttaagacaacttcattctcctccgcttccgtcagatcctcccttttatcaatggctttattcttcagcgcagacagcagcatagacagcgcatccttcctgcccttgtctcccgacttcatagccgtaaccatttcttttcttacctcatcaattttactcatatggtacctcctttttaaaagggggacgtgttctttctagaaagaacacgtcccaaaatcagggcggcctgtcccaaattcaacttgccctgtcccttattctatatggtagcaatctgtttaaattttgtcaaacataaattttcacaaactttccccctgcccaccattatttctgataaaatttttcaacttcctgtggaaaacaggactaaaacagtatataataaggacatcagtgatgaaaaataatttagcatccaaatttaaaggaggaattgaaatgagcattatattcgacgagagtctggtaactggaaacaatatgatagatacgcagcataaagagctgattgaccgtgtgaataagctggttgccagctgtgagacaaataaagagaaaaatgttgccatccagacacttgattttctgatggactatacggtattccattttgatgcagaggaaaagcttcagaaggagactaactatccggattatgactctcataaaaagcagcatgaggagttcgccaaggctgtggaagatctgaaagatatgcttcaggaggaagaaggacctacagatgcgtttgtagccgctgtaaaaaggaatgtttcagactggctggtgaatcatatccagggatatgataaaaaagtagctgactatgtgaaaagtttataaaatggaaagggacctgtatccggatgattttctccggatacaggttcctttctgtctcccagatggcttctgtctcaacccacactcgccttgattaaaccgagcgcctcctctgcgtccctgctaaaattattggcatatgcctcaaagcttattctgctgtcatatccgatggacttcagtgcatgaaagaattcttcataactgcagtgtgcctcccctgtgggataatatctgttatccggccgggcaaaatgtacatggcggagcatatctgtgctttgcgcggtaatatgagctgcggattctttctccgcgcaaaaatgataatagtccaccagaatctttacattcccgctgcctgtgtcctctgccagctgccttgcttccgtaagggtatgaattaggttactctcctctcttctcagaggctcaattagaatggtaatcccttttctctttgcaatcctgcccaactgtctcagcagccctgtcagctgccggtacccctcatccaacgctacgccttctggaacgttcctggacacgccgctccctaaccccacatactctgcacctaatctctctgcccttcccagaacaagttccgtatactccaggatctcctcttctctcctgcgggggcccacgagagacatgccggcaggaaaaaagttattacaggcttcacatgtgattcctgcgtctttcatctgtttccttacttcataaaattcatcctccgacaaactgcccagacctgaaagcggcagttctatatagtcgtaaccgattctggcggcctcatggataaactccctgcctgttttatcgggaccctctgccaccatgctaagacaacatccgtatctcataccctaatcctccatcgtccgttcctttactttctgactgatctattgtatcatagattttctccctgcaatcatagagagaaagaaaaattaaataaaatatttaaaaactgaagactttttcaccattaactcgttatagtatataggtgagttaaaacacatgcttacaatacctgcagaggaggcggatcacatcaaccgggaagaatatttcgaacatctgatagacaattaccagaatctcatttactccatatgtcttcaatccgcaggaaatccatttgatgccgaagatttgactcaggatgtgtttctagccgcctacaaaagcctttcatcctttgacggtactcatgaaagggcctggctcagtaaaatagcggtgcacaaatgtctggattaccggaaacaggctggcagacgcatgattccggctgaagactcttatttcaccggtatagcagacccggagggttctccggaagcacagtatcttcttgcagaatccagccataaggtacagaagctgtgcggtcagctgaaaagtccgtatcgggaaattgccacagagcatttctgccacgagctttcacctaaggaaattgctgacaaaaccggaaagaacctcaagactattcaaactcagctctaccgtgccaaagggatgctgaaaaaactcgtggaaaggagcggttagatgcatatcaaggaaaagaccctgcagaattttctaaacggtacactgaacgccgatgaactgatgcaggtattggaacatctggatacctgtgaatattgccgggaaactctggccgcactggagaaaagtaccccgatggttcaggctcccgcctatctgaaagaacagatcaaggaccgggcacaccgcccggatatacaagctgccgtccagatgaaagaaactacgaagcagcttcagctgttatactacagtctgaaaacagccgccggcgtcataggtgcactgctgattctcctggcagtaagccgattcgatctgattccttccgtttcccgggaagagtccccaggcatcacctcacagatgcccggacgaattcaggaaaaaggcagtcagatgaccgactggctgcaggatattacaaataagattatgaatggaggtaactacaatgactaaacaaaaacgtggcttttggctctttatcttctctcttatccccggagcaggggaattatatatgggcttccgcaggcaggggatcagtattatgggtgtcttctgggggattattgcactgtcctcaacactgaatataggcatattaatgcttgccatccccgtgctgtggttttacagcttcttcaatgtccataacctggcatccctctccgaagaagaattttactccctggaggatacttatctgttccatctggatgagattctgagagataaggaaggcttcctcagaaaatatcagggatttgtctcccttgtacttatacttatgggggcttccatgctgtggaacattatgcgctccatcttctacagctttatgcctgctttcatcatcgatatcctcaacggcatcagcaactatctgcccaagacaattattgctgtcggcctggtagcccttggggtttacctggttatgggtaagaaaaaagagctggatatggaggatgatgatatcttttagagggattcatcataaaaaagaaatagcattccaatctgaggtcagatcaatcccagattggaatgctatttcttttttccccatccgctgaggtgcagaagctgataccctatcccgccgatatcatatcagcaaacataaaaaacaccgtccccgcagctctacgtctgcaaaaacagtgccttaagtgcgcgatcaggggttcgaaccctggacaccctgattaagagtcaggtgctctgccagctgagctaatcgcgcttatttgatttatttcttttacgctgcttcaccagcgcaaaatttattataatagaaactcccgaaaaatgcaagcatattttttacttttttcatattttttttacaaacatgaaatttaaacgaaattccccccgaaaaagagagacgcaatgctttacagcactgcgtcaagtttttcttccaattcctttttgtcaatagcgcccatagcctttccggccacctggccgtccttgagaaccacaaaagtaggaatggacattacaccgtacttctgggccagtgagggattctcatccacattcacctttccgaatacagccttttctttgtattcctcagaaagctcttcaactacgggagccatcatcttgcagggtccgcaccagtctgcatagaaatcaaccagcgcagccttgccttctcccatcacctctgcctcaaagttctcttcatttaacactttaaccatagctgctctcctttctttgtcggggatgtatattcatccaatttacttttcttttttcttttcacccagcagtttctggacctcttccagagatttcataatgtccgtcatcttacttccagccttcttattctgataggcccactgggtcagtgaattttctaagcctttctttctttttgccatagagctttccttctcctgctcctgccttcttacactataatatgaaagcattcccttaaatgtaaattttattctaaaatcacattcagggtctggcgatcagcttgtgaataggatttcccattcccgaaaacttttcttcatactccgtcataatattgccctcagccagtttcacgtcatgatgaagatcatacgtacatgtcatcagtttccatcccgccgcctgaatctcttccaaagaaaattcaaacagaggtccgttatctgtcttgaattctacaagcccatcggggcataatatcttaacataccggtccagaaactggcgggatgtcagtctgcgtttggcgtggcgttctttcggccagggatcggaaaaattaaggtaaattttagcaacctcatcctttgcaaatacctccggaagttcccttgcgtccatgcgcaggaacctgaggtttcccggaacacagccctttgcggtcttatcatccattttctgaatggcccgaagcagtacgctgtcatacatctctatccccacaaagttccagtcgggataaagctctgccatatccatgataaaacggcctttccccattcctacctcaagggcgataggattgctgttgccgaacactttcatccatcggcctttgtactccttttcaccatgtaccacatacgggctgttggatatctcatcttttgcagctggaatatttcttaatctcatagcttcctaaaaatatttacgaaatcttaacgctccctgagagagaattaaaatatatcgttttgccctttctatgttttttgcacaaccttatagtacaatatatcctctgtttagggaagctgaaatgtatattttaggccaaatttaagcattttccgcaataaaactgctaaattgcagggattgtcctacaggcccctcataatttatgtcttacgttaatacttatgataattataaccaaaatacattaattttatataaagactcttcccttttttaaaaaaaggtgtatgatatagaaaagaagaaaactggcagccaattgtaactatattgtctagcagaaatgtaagcaggaggagaaagatggaaaacgtgattaacaaattatccgagatagaatctactgcatcgaagatcatggaagacgttaacatccagaagaaggcccttgccgcggagatggaagaaaagcaaaaggcctatgatgcacagatcgattcccagacacagaaagaattagaaaacatcagaaagaagctggaagagaaaaaggaatccgaacttgcagggttaaagatgcgtacagacaacctggtaaaaaagctggatgaatttttcgaggaaaaccatgaggatatctccaaagaattattcaataaactattaaggatgtgatattatgggaagcttattatcctacagtggattatccactaagattcgggctatgcagcaccgtctgatagacatcccccagttccaggagatctcacagatgaccagcgttccccaggtagtagcctaccttaagaagcagccgggatttgaaaaactgtgggctgatcttgacgagaacacccttcaccggggagaaattgaacacttgctgacccataccatctaccagaactttacgaggatttatcatttttctaatccaaagcagagaacctttctggcgctttactttaaacgctatgagatctccattatgaaagattgtcttcgtaaaatttttgatcacagggaggcaacgttagacctgtcaatctttaaagaattctttgaccgccattcacagctgaacatttccaagctcactgcttccggcaccatcgaagaattcattaataacttaaaggaaacggagtattacgcccccttaagccgtatactcaactccccaaaagaacagccgctgctgttcgactacggaatggcgctggatcagtactattttgcacagatctggaaggtgaaggataagctgttcaagaacgtggatttaaaggaaatgacacaggcgtacggccgcaaattcgacatgctgaatctctcgtggatctacaggtccaaaaaatattatcaaatgtcacatgcggaaatctatgcgctgctgatcccggtgcggttcaaacttcataaggaagagattacagccctggtagaggcaaatgatatggacgaattcggcaagctgctggcgcacacatactacggaaggaccttagatggtatgacacctgagaatctggaaaatgagtacaattatgtgctccgctccattttggaagtggaagcccgcaggaatccccattctgtggctatcatctattcatacctgtatcacaaagaacatgaggtagaccggctaactactgctgtggaatgtgtgaggtatggtgttccccctcaggaaaccatggaacacataatgaaaaactaaaaaaccctggaggtaatgcacgtgattgtaaaaatgaagtttttaagtattaccggccctaaggaagacattgaccgggtggtaaataaatacctggccaaatatgaaatccatcttgagaatgccctggctcagctaacccaggtacagcatctcactccttatatacagataaatccctacagggaagtgctgaataaggcgactggattcacagagcttttaggtaatacagacgatattccaattgaagacatcagcgttgaagatgccattaagctggtacaggatatggaagaaaaactaaccggcctgaacagcaaaagagctggtctggaagaaaaacggagtgctctggaggcctctatggagagaattgaacccttccaggaactgccctatgatatctcttcggtgattcattttaactttgtacagtcccggtttggaaaaatcggaaaagagttctattcaaattttgaaaattatgtatatgaaaacctggatgcagtattttatccctgtcattcagatgatgagtacgtatggggcgtgtactttgctccccggaccaccattgccaaagtagatgcggtattctcttccatgcactttgaaaaggtatttatccctgatcaatatcagggtactccctctcaggcttacaatgcactggatgagaaatatcaggagataaaaaaagagatccagtcctgcaagatggaaattacccaggttcttcaaaaagaagcaatccgcctgatttccgcacaggatcgcctggctgctctctctactaactttgacgtccgcaaggtagccgcctgcactgccgcggatctggataccttttatatcctgtgcgggtggatggctgaaaatgatgcggaggcgttccagaaggaaattgagaatgatatgaatctcttctgtattattgaagacgatcagaacaatatccactgccagccccctacaaagcttaagaatccaaagccgttccgtcctttcgagatgtttgtaaggatgtacggactgccggcatacaatgaaattgatccgactatatttgtagctgttacctatgcctttatcttcggcgctatgttcggggatgccggccagggcctctgccttgtagccggaggctttctgctttacaaattcaaaaaattgaacctggctgccattataggcactgccggaatcttctcaacctttttcggatttatgttcggaagcgtctttggttttgaagatctcatccctgcagtctggctacgcccggtgaaaagcatgacccagcttcctcttatcgggaatctgaataccgttttcgtggtagctatagcctttggtatgtttctggtagtggtgaccatgatcttccatattataaacggtattaaagccaaagatacagagaacatctggtttgacaccaacgcggtggcaggtcttgtgttttacgccgccattatacttaccatagggttattcctgacagggaataagctgccgggggccattgtcctggtaataatgtttgttgtccctttgttggtcattgcaatgaaagagcctttaaccaagctggtagaaaagaaaagtaagatttttccggaggaaaagggtatgtttatcgctcagtccttcttcgagctttttgaggttcttctcagctacttctccaataccctttcctttgtgcgtatcggagcatttgcagtaagccacgccgctatgatggaagttgtcctcatgctggcaggtgccgaagccggcagtcctaactggattgttgtagtaataggcaatatcattgtctgcggtatggaaggtctgattgttggtattcaggtacttcgtcttgaatattatgaattattcagccgtttctataagggcacaggcaaggaattcatcccgtttttatatcgcagcaaaaaaacaaaagctgcgaaataaataaatattaactttaaaaataggaggtcacattatgacaacagtaattcaaatcttattagtaacagcattagtactcagcatcatcgttccattcggagcatacctgatcggtgaaaagaacagagggcgttataaaacctctctcggcatcaatgtatttttcttcttcggaaccctgctaattgccgtagtgaccatgttcacaggaaccagcccggcacttgctgctgccggtgactccggtgcaggcctctccacaggtcttggttatatggctgctgctttagttaccggattatcctgtatcggcggcggtattgcagttgctagtgctgcaagtgctgctctcggtgcaatcagcgaagatcagagtgtacttggtaaatcacttatcttcgtaggactggcagaaggtgtctgcctctacggtctgattatatctttcatgatcttaggaaggctgtaattcaattatgaagatgtatcttatcagtgataatgtagatacttacaccggtatgcgactagctggagtggaaggcaccgtagttcacgaaaaagaagaactgcggaaggctctggagacgaccctcgccgataaagaaatcgggatcattcttctgacagaaagattcggaagggaatttcctgaaattattgatgatgtaaagctcaatcacaagcttccacttatcattgaaataccggaccgtcacggtacaggccgtgctccggactttatcacatcatatgtcaatgaggcaataggcctgaagttataagtaaatctatgaacgctgtgcgttctcagaaaagaaggtgaaagaattgacaacggacgaaaaattacaacatttctatgatgtttccgtagaaagtgccaaggccgaagccgcacaggaaattgaaaattataaaaaagctttaatgaagctgttagaggaacataaacaggacaaaatccgccagtcccagatggagctaaaggctgaaacagataatgcaaaacggcagattaacaaagctctctccgtagagcagctgaatatcaaacgccgtctggctaaaaaacagctggaactgagagactccataatctctgaggttaaaaaccgactggaagaatttatgagtactcctgattaccccagatacttatgcaagaaaatcaacgaggccctggagtttgcagacggggatgagatgacaatctatatctcctccaatgatgcttctctgatgcctactctggttgcccagacgaaccagcaggttgagatctcctccgagacttttttcggaggtctcaaggctgtgatcccatccaaaaatatcatcattgacaataccttctctgccctggtagaggcggaaaaggcggaatttacatttgacggagggctttcttatgaataaaacaggaattatctacggcatcaacggccctgtcatttacctgaaaggcaacaccggttttaaaatgtcagagatggtttatgtcggagaagagcatctggtaggcgaggttatcggcctgaccaaagacacaacaaccgtacaggtctatgaggaaacctccggtctgcggcccggagaaacggtaaccgcaaccggggacgcagtgtccgtccttctgggacctggcatcttaaataatatttttgacggtatccagagacctttaagtgaaattgcaaaagaatcgggcaaatatatttcccggggaatgcaggtagactctctggatccccataaaaaatgggatgtgcacattacagtctccgtgggagacgaggtaagcggaggcaccataattgccgaggtaccggaaactaaatccattgtacacaaatctatgattcctccctatctgagaggaagaattataaagacagcagaagacggacagtataccattaatgatcctattgtaaccgtacagaggcatgacggatccgaggtggaggtcagactggcacaaaagtggcccatccgaattgccagacccacagataagcgttacccggccagcaagccactgatcaccggccagcgtatcctggatactttatttcccattgccaaagggggaaccgcagccgtgccgggtggtttcggaaccggaaaaaccatgacccagcatcagatcgccaaatggtcagatgcagatattatcgtatacatcggatgcggagagcgcggaaatgagatgacccaggtgctcgaagaattcggtgaacttcaggatcccaaaacaggcaatcttctgatggatcgaaccacactcatcgccaatacctccaatatgccggtagccgcccgtgaggcatccatttacacagggcttaccctggctgagtattaccgggatatgggatatgatgtggccatcatggctgactccacttcccgctgggcagaggcgctccgtgaattatccgggcgtcttgaggagatgcccgcagaggaagggttccctgcctatctggcatcacgcctctccgccttctacgaaagagcaggtatgatgcagaacctgaacggcaccgagggttcagtgtctatcatcggtgcggtatctccccagggaggcgacttttcagagcctgtcacccaaaataccaaacggtttgtccgctgcttctggggcctggataagtccctggcttatgcaagacatttcccggccattcattggttaaccagctacagcgaatatctcaatgatctggctccctggtacaaggatgaggtctcacccaggttcgtagactacagaaaccagttactggctatcctgaatcaggagagcagtcttatggagatcgtaaagttaatcggaagcgacgtactgccggatgatcagaagctgacgctggagattgcaagggtggtacgcctgggattcctgcagcagaatgcttttcacccggaagatacctgtgttccaatgagaaagcagtttcttatgatggaagttattttatatctctataagaaatcaaaagtactcattgctatgggaatgcctatgtccatcctgaaagaggataatatatttgaaagaataatcgcaatcaaatatgatgttcccaatgataagcctgaaatgtttgaggactataaaaaggctatcgacgagttctacgataaagttttgcaaaagaatgcgtaaaggagggtaatgaatatggcaattgaatatttaggactaagcgaagtaaacggcccccttgttgttctggaagatgtaaaaggcgcattctttgatgaaatggtagagtttcgcatggatgacggcaccagaaagctggggcgtattgttgaaatatacgaagataaagcagtaattcaggtgtttgagggaacggagagtatgtccctcatcaatacccatacaaaattgaccggccaccctatggaaatcaatctttcttctgatatcctggggcgtacttttaacgggatcggccagcccatcgacgggctgggacctatcatctctgatactaaggttaatgtaaacgggcttccgttaaacccggtgaccagagagtatcccagaaactatatccgcacaggtatctcggccatagacggactcactactttaatccgcgggcagaagctccccatattttcaggaaacggacttccccacgatcagctggcggctcagatcgtgcagcaggcctccctgggggatgacactgacgaacagttcgctattgtatttgccgctatgggggttaagtacgatgtggcagaatttttccgccggacctttgaggaaagcggtgtatctgatcacgttgttatgtatctgaatctggccaatgatcctgtagtggagcggttaattacacctaaggttgctttgacagctgccgagtatttggcctttgagagaggaatgcatatcctggttattctcactgatattacatcctttgcagaggctatgcgtgaggtttcctcctcgaagggcgagatcccttccagaaagggctaccccggctatttgtacagtgagctggcaaccttatatgaaagggcaggcattgtgaagggagggaaagggtctgttacgcagatccctattctgaccatgcctaacgatgacattacccaccctatccctgaccttacaggttatattacggaaggtcagattgtacttgaccggcagctgcacggccaggccatctatccccccatcaatgtacttccctccctgtcccgtctgatgaaggatggaatcggtgaaggatacacccgggcggatcaccaggatgttgccaaccagctgttttcctgttatgcaaaggtgggagacgcaagagccttggcatcggttatcggtgaagacgaattgtctccgctggataaaaaataccttctgttcggcaatgcttttgagcatgagtttgtagggcagggacctctggaaaaccgcacaattattgatactctggaaaaagggtgggagcttcttggcatgctgccaaaagaagagctggaccgtattgatactaagattcttgataagtactataaacccacggaagttaaggcggaagtataattaagggagggattttatggatccgaatacatttcctaccaaaggaaaccttatattggcaaaaaactcccttgctctctccagacagggctttgaactcatggataaaaaacggaacattctcatccgtgaactgatgggcctgattgaccaggcaaaagatattcagtcgcagattgatgtgacgttccgtaccgcctatgctgcccttcagagcgccaatatggtgctgggcattaatatggtggcgcagatatccttctccgtcccggtggagacctccatccggattaaaaccagaagtgttatgggtacggagatacctcttgtagagtacgataaaggctcttccgttcccacctatgcctactatggcacaaagtctgtgctggacgaggccaaggctgcctttgagagggtgaaggagctgaccatccggctctctatggtcgagaacgccgcttaccggctggctgtcaatatcaaaaaaacacagaaacgcgctaacgcgttgaaaaatattacgattcctaaatttgaagcactgagcaaggatattcagaatgctttggaggaaaaggaacgtgaggaatttacccggctgaaggtgataaagaggatgcaggggaaaggatgagtcaggggacctggtctttgagatcaggtctcttttgttttgttcaagaaaaaatgggggcaggggtggcagcagcgggcgtccggcaggactcgaggctgcgctcacctcagctaacggtctagtgatcactaagcagctcaggaaagccttcgcggctaagtgttcactggccgtggatcttcggctcgtctccgcttgacctcgtctgccggacgcccgctgctgccacccctgcccccattttttcttgggataaactttgttggctggaactgagcgactgaaagactttcctaaccttggtatttaggtgttcaataggatgtttaagatcagtgattttatattaggtttaccataatgtttaggttatggtaaacctaaatttttacacaatttgttaagttgtttggttgtgtcgctcagtttcgacggcctttgactgatatttgacattggaaaagtcaagggatttgggtggttttttttcgaattaatgcgatttataagaacttcacaaaacctttgttctttatttttttatgtaaaacactctactttaacctcatttttgtggacgatgtggataactttgtgtacaactccattttatagccattaccaactttttaccatgtggataactttatggataaaatgttgatgaaaaggtggggtttttacatagttcgacaaactttgtgcattttttacaaacgtgaattttctgaaaattatgcgtcggattttcaggtattcacttgtggatcttctgatctttttcagagtaatttaaggaacagcacttatgataaccatgttagccggactgacaaagaagctccggcggaaagggatgatatgatttatgaagaagcgtatacttaccggaatcttatgtcttactgcagcagcttttcttgttgtgggctgtcagtcggatagttccggtgattcagccaaagatacatctcaggagagtgaaagtatcctgggacaggtaacggcaattgaagatggcaccatcacgctggccctcggagagcgttcggagaatgaaaagatgcagcctcctgccaacaaggaagatgacggcggaacctgggaagctcctccggatggtgaagacggcggcactcccccggatacagagaatggcggtacccctccgggcggtgaagacggcggcactcccccggatgcggggaatggcggtacccctccgggcggtgaggacggcggcactcccccggacagcgggaacagtctgccgggcgggctggaacttacgggtgaggaaaccaccattgcagcagatgattccgtgtctattgttctggacaacagaggagaaacctctgagggttccctggatgacatctctgtaggttccattcttaccgtggaaatgaatggcggcaaggcagtatctataactgtgaccgtcctggacggcggctctttcacgccgcctgtttaagcccttaatacgcactgcgtatttatctaatatttgtcttcaatgtaaaagcagccatctgcactccctcgcagatggctgcctccttttatatcatatactccgccttattccttttttcgctgcccgccgtaccgtaatgttgttcggcttctcagatgtaactcactacttttacaggctgcctgtaatcatagggagaaatcttaatccctgttttggggttgcttgcatggatgatctgtccgtccccaatatacatagccacatggttaatagaacctcccctgctgtaaaacagcaaatcccctggctgcatttcctcctgggtaatccctgcggcgcctgcggcctgcgacctggagtcccgaggaatggcatatccgaaatgtgcatacagggactgcacaaaccctgaacagtccgtgccgttggtaaggcttgtcccgccccagacatacggattgcccaaaaactgtttagagtacgttaccatctcctggcggatcttggcctcctgcctggctgcctcttctgccagccgggcctgctcctcttctatggactccgccgtctcatagccgctttccaggcttacatattcctgtgaaatatatccctcctgctccccataggaaatcttttcccatccctgcaaggattctattaccggaatctgctccccttcctgcaaagcaccgagaatttccgcatccatagtattgtccgcccggacatggagaacctctgtattcactgtagctgtgcttgtccaggcttcccggatggcaggctctgcctcttctccatatatcaaatactcccgctttatgtatccctctacagaaccggatgatacctgataccactctccttccagtcctgtaatcgctgccactgccccgcggtagagtttccccaccacttcactctcctcagatgccccgcttctgatgttaacataatcctccacattggcagctgccatactccctactgcttcataggttttctctaaaggtagactgattcccgcaagtgcagactccgtaggcagtgcatatgcattcacctgagaacctgcgagtactgtcagtccagtgagcgcacacactgttacttttgcaattttgttcctcatattaccctccaaatataaccttctaaatttttatgtataagtctttccctggtgtctcttgaatatgttacaaacttgttacgacttattacatttttattctatcatgcggaggtttttatgtcaaatatttaatatctgtttatttttacttaatatttgcttatcagacaaattcctgctctgtgccggcagaaaaaacgcgggggtatacggtatccattgcaggataccgtatacccccgcggtcactgccgcctatcagtattacattcccaaaaggtagttctgagaagctgtcacggaattcgccccgtcagcagccgccgtaataatctgccgcagcatcttcgttcggatatcccctgccgcgaagataccgtccacactagttttgcagtcttcgcccgcaatgatatatcccttttcatctgtatccactatcccctggaacagttctgaatttggttttatacccacagcaataaacacgccgtccacagccagatctgttctggaattgtccttcacattttccaccgccagcgtatttacctggccttcccctttgatttccttagccacatgatcccatacaatctccacgttatccaaagaaaagagtctctcctgaaggatctttgcagctctcagctcatgtctgcggtgtataagataaacctttttgcagatcctggccaaaaatattgcatcttccacagccacatccccgccgcctattaccgcggttgttttgtccttgaaaaaggctccgtcgcaggtagcgcagtaggatactcccataccggaaaattcttcttccccggggattcccagcttactgtgacgggcgcctgtggcaatcacaatggttcttgtcttatattcatttttgtctgtgataacctttttaagctcaactgcagggccgtcctctgcaacatgcatctccgactcatcctccgtctccggcactacctcctgaaccttctccgtaataaactgcgcgcccagcttttcggcgtgttcccggaagctggcccccatatcaaagccgttcatcccaggaagtccgggatagttatctacctcatacgtgttcacaacctggcctccgctcacaaagttctgttccagtataatcgcattcagcttggcccttgcagcgtagatcgccgcactcagtccggccgggccggaaccgataattaccatatcatagatattactcattctgattctcctttctcatcactgtcatcgggcagggtactggcaggcacattatcttccaggggcggctcctcgggtgtatacattgccgtggcatccaccgaatcctccccttcatcctgctccccttcattctgaggcagcacatcgggattgttgttaacctctatctcccgcacaagccccaggctttggtctatgctgatcttcagataatccagctgctcctcatccgcatagtaataataattcaggactccgtcctcttcttttgttacatattccacgccgtccagcaaagctttaacattctcctcatccattcccagggtgatacccttataaaccttaataggcaccttggtcacttcaaagtctccatggacagacgtaacaaaactattctctataataacaggaacatcactgtaattagttactactccgtaaagtctctgcccgtctttttccagggccacgtacccgtgctttcctgcctccacacttttatcagctccctcctccagaagactccagccgtttttcagaaactcagccacaggggcaggaattctgtagtaaaatcccccgtattccagcgcaaatgcagagatgtcctcctgaagcccttccggccttgtataacctaaaacctcttttgggggttcccggctcacctgcccggatcccttttcactggagggatttcggaaattcttcatttctatcttatacagaatctcttcctgcgcatcaaacagcaaatctgctttcttataaataccatattcataggttaaaaaaatggtatccttttcttcgtactgatccgcagcctccccgtaagcttccagaacatcatccagagaagatttccccataacaatctctccgggaagggttacctgcatgtccttattctccctgagatcaagggtaattcctcccatttgacagctggctatgggaagggcttcgccctccagattcacaatatctgccgtcagggttacttttcccctcttaatggtgcttccctccaaaaaggattctgaatccatgctcttggtatcatccccgtcgtaaatccatcccatggaattcaaagcctctacagacatagggagagaatacgcctctccgtctatggcaaacgcaaaatccgacagcttcccgggcaattctatctccccgttagggtctttctcctccaggggttcttcctctatctgactcgaagatgtgctttcctcctcagttttatcctttgctttgtcgttacagcctgccagcaacactgtaaccgccagcagacagagccatgcccgttttttcataggcaacctcctttagcagtctcatcctatggagattgtaacacactccctcatcttttccaaataattctttccaccagatctggaaaatattcataccttgactatccgctcataaaatgataaagaatccttttcctcttttaaggagcctttctatggacaaatccttacttcgcaaacgtcttcttcctatccttactgtcctgctgctgtctgccgggtgtctgactgccgccggaatcaaaaaagacgtgtttcctacagaaaataaaaagtttcaaaaattcaccgatcagcttttccaggaagaggtcagctctaatactctgaacctccactataccctggcaaacccttcttcctacggcatcactgactatcccatttcactggggagcctgcgttcagaggccatacccgccagctatacggcgattgaaaactatcagacaaaactgcattcctatgactatgaaaaactctcagaagagaatcagatgacctacgatattctggagcaggatttttctactcagctgtccctgggggataattatatgctcacagaagtcttaagtcccagcctgggtattcaggcacagctccccgtacttctggcggaatataccttccgcaccgaacaggatattgcggattatctgaacctcctgacatccattcccaaatacttcgaagaaatcgtggtatttgagcaggaaaaatctgaacaaggcctttttatgagtgataccacggtggaccggattacggaacaatgcaatgcctttgtggaatctgcctcctccaattatctcacagccatgttccgggaaaagttggagaatatggcctcaggtgcttcagcggaagcgtcataccagccctccccgcaggacattgaccggtacatagaagcccatcaaaaggtgatggatactcaggtattccctgcctaccaaaatctggtgaagggactgaccgccctgaagggtacgggaaagaaccccaatgggctggcaggttatcccaatggtgtggagtattatacctatctcatccggaaggatgtaggggatttctcctccctggaagagatcgaacagcgcctttacaaacagcttctcgcagactaccaggagatgcagcagcttatcacagcccacccggatctcattactcaggccactgagctggaggcatcttcctctaacgttgccgcagatgtccccacaacggatgtccccaaagaaatgctggagtccctggaaaagaagatccagacagacttccccaaggccgccgatacttcctatgagattaaatacgtccatccttctctggaggaatttctgagtccagccttctaccttacaccaccggtggatacgcagtcccccaatgttatctatattaataacggtacgccatcctcatccctggagctcttcaccacgctggctcacgagggattccccggccatctgtatcagaccctctacttcgtccagcaagatccctccaatatccgttacctgctgagtaactccggttatgtggaaggatgggccacttacgtagagtcctacgcctacggctatgcagacgcagatccggctgttacccgtctcctatggctgaaccgttccgtcaacctgtgtctgtattctattatggatatggggattcactatcggggatggaccgttgacacggtaaaagagtaccttcaggagttcggcatagccagcgaagagatagcctctgagatcttccagtatatcgtagaaaacccggcaaactatctgaaatactacgtagggtacctgaactttttggatctgaaaactgagatgcagacttctctgggggacagttttaacctgaaagaattccatgaggaaattctgaagcttggaccatcacaatttccggttcttaaaaagtatctgaaggctgaaatgttataaaaaaatcagcgctgcttcgccggccaatggcccgcatcgcagcgctgtcttttccttctctattgatacctctgaaaaaacttcatcaaattcttcagcgcacctgtcagaatctttgcttcctcttctgagagtccttccagggttgcacggatcatatcctcatgaaatctcctgtgatgttcatacgccttcctcccaatgtctgacagggaaatcagaaccaccctgcggtcttcctcgctgcgcactctgtttacatatccctttttcaccaggctgtttatggcaatagtcagtgtccccacagtaacagacagcgtcttggccactgacgacatatttcttggttccccgacgccgattgcttctataatatgcatatcattattggaaatattaccgaactcagaagtaataagtgctttttcttcaatatccataatctcatggaacatattcacgaaaagttcatttagtgtgctgtaactctccacattatcactccttttttctttcattatacacgaaggatgtatattactcaagaaaaaaggggaaggaatgcgaaatttttgataatcaaatctttttaacgttcccaatcctccggcagaggcccctaaggattacttcagcaaaaatttattaacaatcgtagtcagattggatataaactcagaggctttgcagtccagctcctccatagagtaatcgttctttctgcactcaatcagcagcccgtgaaacatatagacaccggtctgcgcaagcagacgggaagcgtccggggacaagtaccccatatttgcagcacggcggtagaacatatagtctctctcaaagatatcactgttaaagataaaactaaccgcaaaaccgtctaatccggaaaaattagatgcgtatatttcataatattcatacatgagttccataaggtttgtactgtatgaaccgaaaaatattgtctcaaaaatgtctgcattatgaaatgcatagaaggaaaaacgctcccacaatttcagattcagttccaccggattgataatagtgctggaataatttttgatatcctctatatacggctccaggtatttcacggacgcaatacaaatcaggtgttccaaatcattaaagtaccgatacagcgttgcgctgttgcagccaacttcatttgccactctgcgtatgctcaccccggacactccttcggtctgcagaagtttatatacacactcaatatattgtttttttacatcttgcttcatttctcattcatgcattcatgattctaatgaaaccaataagctttaaaatcatagaatccctttctattttctggtaagacgtattttataaaccatttctttattatatgatccaggaaattaatagtcaagacatcttgagttccctaaacctgcaggcaaaataaatcatgattattttattgcatgcgtttccacagtaaatttgaataattatttatagtttacaccaatattttcaattaatattcattttttcaatttcaatattgacatcttctaaaccatatgatatgttctaaataacaattaataatcgcgattacacataaattcgaatcgcgatttccgtatcggtcaaataggaatgataggaggatctgctatgacaaaagaaagaattaacattcaaagaattcatgaggcaactatggaactggtagaaaaagcgggcatgaaatttcatcatcctgaagctgtagaaattttgaaagcacacggtattcgtatggaggggaatgtagctcattttaccgaagagcagctgatgtactgggtgaggaaagctcctgccacctttaagatttatgcccgtaaccccaagtacgatatggtaatcggaggtgatcgcgtgaactgtgctcctgcatatggctcaccttttatctctgatcaggacggaaaaacccgcgacgctaccattgaagattacgtcaagtttacaaaactgtttcatatgaatcagaactttgatatgaatgggggcattatctgtatgccggacgatgtccctgttgacaatgctaccttgctgatgttctatgccgccttcacccattccgataagtgtatgtttgccggttccggcaagcgggagcagctggaggcaatgtttgagatggcgaaggcagcatatggttctgaggaagacctgattgcctacccaaggtttactaccatagtaaatgtcaacacccctctgcagtttgcagaaggtatgacagaaaccttgatgacgtttgtaaaatacgggcagcccattattgtcgctgcctgtgatatggccggaacaacggcaccgattactctggcgggtatgatgacgctgacaaacgcagaagttttatgtaccattgccctggctgaaatgattcgtccgggcactccggttatctacggttcccagtcaacaggctccaacctcagaaacggcgcgattacaagcggctcccccgaaggcgccattgcctataaatatgccgccaagctggccaaatactacggtctgccctgcagaggcggcggcagtgtcagcgatgcaaaggttgtggacgcccaggccggttacgaatccatgctgacctttatggtgtgcagccagagcgagatgaatcttatcgtacacgcggcaggtattctggacggatacaactgcatctcctttgagaaactgatgcttgatttccaggttattgactatgtcaaaaggtatttgaaagacattgaatccgacggagacagaatccctcttgaacttatgatctctcaggggcagagcgggcagtatctgaccgaagagcacactctggattactgcagggaagaacccctggatccattcctcagcgtcagcggtccctgttcggatcccaagaatcagtttggtataaacattgataaagcaattgccgcatctcttgaaaaatataaaatgccggataacgatcctgcagtactggaaaaaatgagagcagtcctccttgcaagaggcgtggaccctgcgctgctggataaaatcgaagcattataagcagtcagatgagtctgcctcctctcaccggggcagactcatccggagtcatatgcaagggatgaataaagaaaaggaggcggtaggatatggtgttaacaggaaaaaaacggtggctgacgctggtaattgtctctttattatccggtatcatggtatatgtaccttatctccgttttaattattatgaccagatggtcctgcttttttcagaatataaacaaattgcaaagccatccaatgtcaatgagtttattggagactgtactcttgtcctgggagttgtctgtaccgtgggatatcccatcggcggttatcttgcggataagttcagcgaaaaatggctgatgattctcggcgcagttcttatgggcgtatgctccttctggtatggtcttgtaccgggcggctactcccttcaatttatccacttcttttatggaattggtaccagcatcctcatctggagcgcatatttgaaaacagtgcgcaaactcggaaacgcgaaagaacagggaaggatgttctccatgtcggaatttgtccgcgccatctggggaacgattctggggttcctggctgtaggactcctgaacagggccattatgccgggcggggaaaccgacctgaatgtactcgccgcccagtggaaaaatgctatgttcttttgcggaatagccttttttgttcttggggcgctggtatttttccttcttcccaataatctcataggggcggaggtggaaggggaaactgcccaggaaaaactcacgttcaaaaatgcagtaatcatattgaaaatgcccggcacatggctggtttctcttctcatctttttctgctattcatttacagccgccggttccggatatttaggcgcgtttactgtaaatgttttgggcgtctcccagaccacggcaagctcctttgccatcgtcagaaattatattatagccggcctttccactctggccattggctttattgcagataaaattggatttaaggtaaaaaccctgggatactatctggcaatagcaagtatttttgtagctgccatgcttttgacaaagaattctttaaccttaggaattgtaatatcctttggttttgcaattatatacacaggcatgcggggcgtttattttgccactttaagtgaagtgggcatccccctggcactgaacggcgttgccacaggggtagtctccctcatctgctatctccctgatgtatacttcgcaaaggttgcgggaatctggctggatacttatggaaaccacggttatgatcttatttggtactggaccataggatgcggcgtactgggtgtgataactgccatcattaccacacgttatgcaaatagtctgaaaaagaagtctggccgcaggtcatagcactgtccgtacagtacaataacgggggaaatacttcccccgttattgcttcagatgtctataaaaaggattatgtcccggccatactcctgtgaagtgtacaccggaactggatagcacaaacatgcttatattttataccccaaataccccgggcagccaggtaataatccccggaataaaggtcatgaccagtaaggcagctacttcagcacagagatacggaacaatccgtttgctgatcttgccaatactggtgtcagcaatcccggaagcaacaaacagattgactgccataggcggggttatcataccgatagatgtattaataataatgatgatacccagcgcaattggtgataatcccagagatgctgcaatcggcagaagaatgggcgttaccagcaggataatggcctgggtttccaggaagcatcccaaaaacagcagaatcacgttaatcatcagcagcagagccactttattggtgaacaggcccagtacactggacgcaataaacgtagggatattctggtttgtcataaaccacccgaaaggcgcagacatactgaccacaaacagtaccactgcggagcttactgttgattttttaaagattgcatagatatcttttatatttaattccttatatacaaatacactgataagaaatgcgtacacacaggcaactgcggcagcctctgtcggggtaaataatcccccgtagattcctcccaggatgattacaggcataaaaatcgccagcaatgcttctttaaaagagtagaggaatactttcagtgtaacctttcccgtctctgcagcatcatacctgcggcaaagaaaaatattagtggcaatcagtaccactgccagcagcagtcccggaataatacctgcgataaacatagtaccgacagataccgaagcagttactgcataggttaccatagggatactgggaggaatgactacaccaagtgtaccggccgaagcagctacacctgccgccacatcatccggatatcctttttccttcatacggggaatcgtaatccccccgatggcagcaaccgttgccgggttggagcctgagatagccccgaaaaacgcagaggcagcaaccgtaatgcaggacaggcgccccggcacccttctcattaaaatttcaataaagtcaatgagccttttagagattccgcccttttccatgatattgccggccaggataaagaaaggaaccgccatgagggtaaagttatcagcctgtgtaaacattctctggggaactgccggcagaagattcatattcccgctggctacgattgccacgcacactgaaattccaaggcagacagcaatgggaactcccagaaacagcacaacaaataaaattccgaacaacattcctatgatcattattccgtctccttcttttcttcttctttaagttctaatttaccggttactctttcatacgtgtggtatccatagcatactgccataaggagcagtcccaggggaattgccagatacatcatccacatgggccatctgagactgggggtgatctgcccgcttgccatctgtgactccagtatccggaacccatagcaggaggcgaacacgcagaatcccagaaccaggacagaattcaccacataaattatattcagtatccttttgctgcaaaacagttccaaagcttccacacagaagtgttccccattgcacgcagccacaccgatccctaaaaagataacccatatcatacagtacctggcaagctcttctgcccagggtataataaataatccgctgaaacgggctacggttgccacaaaaataaccacacacataattaccattaagataaccagcaatacttcttccgccctcttcagtccatcaaaaaattttttcataacgctcacctcattatttgcatgcttgaattttctctaccagttccttattcagccctaagctgtcaagctcatcgtagacaccggctgccgcttccttccattgggctttatctacatctgtcactgtaacgccggcatccttcatcttctggacagcctcgtctgtatagcctgcactgtattccctctgatacgttttggcctcctcggctgccttatcaaatgcctccttctgtgcatcggtaaagctgtcataggtgctttgagcaatcatcagtacacatggagaatagaataggtcaatcatagagacgtatttctggacctcatacacttttgcagactcaataatggcaatggggttctcctgtccgtccaccgtcccctgctgaagagcggtgaagatttcactccacgccataggagttgccgtagccccaagctccttataggtggccatatgtacgttgttctccatggtccggattttcatacccttcaagtcttccggtgcaacaatttcttttttgtcgtttgttacttcacggaacccgttttcccaaaagcccactcccttgattccctgaccctccagttcttccaaaagggaggcgcccacttcaccgtccagtactttatatgcctgccgggcatcctcaaacagatacggcaggtccagtacagcaaaatcagggacaaagttcggaatggggcctgtagatatcagacacatctcctgtactcccatgcctacattttccatcatgtcacgttcatttcccagctgagagttgggataaatatcaatagtcatctccccgtggctgtactcctccagtaatttctgcatctcctgcaggccctttacgtagtgtccctcaggggctgtggtcgtacctgccttcaggtgcactgctgcactctcagatcccagcatggtatcctctgacccgctgccggctgccgtagtctttgcagttcctgtttcattggaggcacctgcgcctcccccgccgcaggccgtcaatgtgcctgccaatgttactgctactaatgctgcaatcactcgttttttcatgcgctctctccttctcttttttgggattttaattggtgcctatgtttttatggttaatcataggcaaaatacatccaacgtttaacgtctttggttttactattataaatgatatttttgctgttgtgttgggatttactggatcctcacagaatcttaacacctggagtctaacgatgcaaaaataaaaagcgcaaaaaagcagcggcacagtttcatatcaaactgtaccgctgctgcagctatcctactgtaattttctctttcttatccgcctctttcttcaccgtcctcagcatattttccatgaagccaagctttctaagaaaaaatctggcgatcatccccacgactaccgccgctgctatggtgccctctctgactccttgaataccatgaaacatcacagccgagatccctccggcgatgacagtcatggaggcgtcaaaggccaccttagtactgccgaattctctgtgatacactgtggagaccgcatttacaaaagcttcccccggcagcattaccacatctgccagcacctccataaatacgccgaaccccagtatcacacagccgcacagaagaaacagcagcttcatgtaatacacctcagggtggacccatctcagaaagatcatagttatatcaatgaaatacccgaataaaacagaaaccggtatctgcagaagctgatattttttaaaatccctcttaagaatcagcatttgtcccaatatgagcaggatactcaggacaatggtaaactgaccgatggtaggggtgaaccccaggcttaaaacgtatggaatgctggagataggagaggttcccagatccgcctttgtaatacagcttacgcccagtgaagcgatgaacagacctgccaggaaaaataaataacgttttattagttctctcttttccatttatccccctcaatccccgggcatttctttccggcagatatttaccagttccggtatcacagccgctacgatctgctctcctttttccgatgatgaggaataggcactggccagagcacctgtctccgggacatccccctttttcagagggtacctgaaatagggcagtgcctctgccggctccgcctccgccatccgctccaaatggcagagctgaggcgcaaaatacatcatcagggaagtctctgtcaccgccgcatgttcaaatgcccagccaggaaacggtacctggtcaaatatcttttcgatcacttcctcggacagaggatcccaccagttagattccacaagaaaggcagctcccttggtatctctgttgacaagatccattgcctctacaagaaaagcctcattttcgaaatgggcgttcataataaaaatttttgtaaatccgtctctgaccagctccatcagcacatcataaaccaggcgaattacggtttctccatttaagtcaatagtccccggaaataagggtcctcccccgctcagcggttttgacttatacccataagacaagggcggcatcaccacaccgtctattttttctgccagccgcagggcaaactgctctgcaatcactgcgtccgtgcagataggcagatgcagggcatgctgttccacagccccaaccggcaggatgactaccctgtcctttttcgccgcaaattccggccaggtcatttcttccatacgatatgtcatagctttttcccccaatcctttcctatttgtcaatcccccgtattttcataatcagctgctgatgcgtggggtttccgttttcatccagggccacttcggtctcatcctcccctgcctccttatagtagcctgagatacacccgatctccactgcgggactggtaagctccagctcatacagctgccctttttccacctccactggcccctcaatcacagaatacagagcatcctcactggtaaagggaagcgtatctacctgtccttcatataccaccgttccattttcatggctgcgcaccactacgttcatgtacgaatcgtttatccggtaatgcaggcacattttcatctggatatctgtcagtgtattgccgtcggcatagaacagctgccggacgctggagtcttcactcacatccacctccgcacactccgccagttcggaggaagagttatccttgaagatcacttcccctctcaccacactggccaggcagaggaaggccggtaccgcgaaagccagaacacccaccgcaaatgcggcgcggagctggttcagaagtcctctggatacctcagttctctgattggtgtgaaatctgggatggttaaagacaaaatatgccagcaggacaacccagatggccgtggccagaagcgtctcatcatgaaatccatagatatcccacatacttgtggcaaattgccgcccttttatcagatatttaaagattccccctgtcagcacaccggcgcctaccagggaatgactcatgaatatatacatggctgccataagaatattagtaatcataacaaaaagattgccgtttttattccggaagatgctgagcagcaggaagggaacaatcagcagaagccactgagggttccagtttgccagtccgaacagggtaaaactcatccctgtggtgagaaaaagcgcccaggactgaagttctccgggagctgtggttttcctctgatacgcccagaccagaaggaaggccgccatcgccatcatcaggttaatccctgagatgaacccaacatcaaaaccattgtctacgaagtcaagagccccaaatcccagaacactcctgtggaagtaaggggaactccagtttggcagtacttccgcagccagtggagccagggcaggaacggcatactttatgatattccggattttcttctctttcagaaccagcagaatcagaaaataggcgagggcctgatacttgaaggtggcagccattccgaaggcaagggcaaacttcagcatatcccacttttcacccttaaagtaaaagtataagcccactaccacaaaaaatacagtaaagatgtcgtactggctgaagataaactggctgtacaccccaatggggaaaatgataaacgcatacttacagagtcttgcttttttctccccaaatcccaggagcagtgcgattttatagattacatgcgctgtaataaaatacagaagcaccggaaggagcttataccacatgttgctcacaaaggaattcacggtattgtccgcaggggcccccttcagtaaatagagaggcaggttccacacagcaaacgcaataaacgtactgggcatgtaattggcataaaaatttccggattgctcaaagcttgccttataaaagtcaaatggatgcttatagagcaggaaggaacggtttcctgtcactctgatatccccgtgcacaaaggcaatgtacaaaaaagccagcaccgcaatagtgactataatatctaatttgcttatttcttcgcttttcagcaggggaagtcccttccacctgctaaacagcgtctctctgtctttcttcttcacaattcttctcctcaactaacgcttcttcttcggaaccggaagttccgtcctcaaaattaattctttcctcctctactaccagcggcctgtccagcaccctggtattaatgctgagtacatattccccaagaaaacctataaaaaataactgaagggcacccagaaagaatactccaataagcataggggcaactcctgcggaaaacctgtcccagtagattaatttcataataaagtagaagagaccggccagaaaactcagtccggccaccaaaaagcccagaaaagtagccatacgcatcacaactttggagtaggaagtaatccccaccatggcgtagtcatacaggctgtaaaaattgtttttactttttcctgcctttctcttctgctgctcatagggaatggctttatagtcataccccagttccgcgataatccctctcagatacggcatgggatcgtggagctgcctcaccacgtccacaaaggatttatcatagaggccaaagccggtaaactgttcaatatgatcaatatctgtgatccgttttaccagtttatagtagcaggcccggatagcatacataatgcgcctctccttgctggatttcttaatgcctattacaatcttatgcccgttttcccattcctgcacaaacttttcaatcatttccacggggtcctggaaatccgcacacattcggatggcacagtccccggtggtctgtttcagaccatatacaggcgagcgcatctgtccgaagttttttgtgttgaagatcgcctttatttttttattttctctgcacagatcccgaagatagttttgggtctgatcctgagagtgattatctatgaatataatttcatagtcgtatcgggagagcttccgggtaaagacttctgttatagccgctgccagaggctttacattcttctcttcattgtacgttggaataatcacggatattttcttcttcattttacatttttctccttaaaccactctactgtttccttaatcccccgctcaaaggtatattccggaacaaaccccacatcttctgtaagggtactgatatctgcgcagaggttcatcacagctcccggcggatatggacgtttccctatgccgggacgtaccccgggtgccgctgcatcccgcatctcatagatgtattcctttaaaagacgggcttttccgcttcccacacagtatacggcaccgtctcttcccctctctcctatgagataatacgccctgcctgcgtccttgctgtacagataatcccatctctgctctccgggggtaaactctcccggctgccctccgaggaatttttctatactgctcatgatcatagagctttccttgtcatggattccatatacactgaagatcctgggccagatacattccatacccagctcccggcaaaggagaaatgccagcttacccgctgccagcttgctgactccatagggtgtctgggggctgaccggggccccggggccgatccgttccctatccagcactccgtattccgcctgggatcccgcgccgataaacctgcggcacccaagtgtctttgccgcccgcaccgcatccagggtgtactgaatattattgctttggagctgtacacttttatccctggaagcaccggtattcccccaggcaatatgataaaaagtatcgcaggaatctttgatgagatccggcagccgctccagttcttccaggggacagtggatgatcctcagccgctcatgagggggaaggcgaaaaagcttgggggagtcctcccgcaccgccgcgtagaccagcagcccccgggccaggcattcctgcacaagggctgcccctatcatactggtagatccggttattataattttcttcacgattcttccacctccagggggatgtacatattatctttcagctcctcccggtccaggaagggatacatgtcctccagcgtcgcagataccatggtgccgtcgggaagctgccgggaagcggtctttggctctgtcttctgatattttgttgcgtatacctcgcagatgcagggggggtttgccctcagagcggccttcaaatcctctctcagagtcttcccggatctgcagctgcagtagggatatccgtaagcctctgccagttttcgcagctccggaaaactgagatccccgctttcctctcccactccgaccaccggctctccaaaataattgctctgggtctgccggatggagtgatacccctggttattaatgacaaagatccgtatagggagccggttgtggagaatggtctgcagctcctgaaggttcatctgcagacttccctcccctgtgacacagattgtctcccttcccccggcagcgctgacaccgatagcggcagggaggccataccccatagaagccgtattggggttggtaatgaacctctggttctttttgatgacagatgcctggcttcccgccacacgggcggtgcccacgctcactaccatctgggctccctcctccagcaggtccgttagctcatgataaaaggcatagatattggtatatccgggttccacgtcttggtaatgttcctcattcacaaccggatatttctttttccaaccaaggcactgtttcctccattcttccccggaaaaccacgggtgtccgggagaacatccccgctctctcacctccgtcagaagcttatgtatcaggtccgcggcatccccgcatacaggaaggctgacatggagattgggctttttcaattcctccccgtcaatatcatttaagatagtataagcaccccgggcccagcttttatattggaaaccagtctgcacaaagctctggcggctgcccagagagaggagtacatcacagttctggactgcaaagtttcccgcccggtccccggtccccccgtttcgccccgtatacagaggatggtccgtctccatggcatccacgctgctcattcctgtaactacaggtatccccagatgttccgccagaacatggaattcgcggattgccccggacagccttaccccatttcccacaaacaatacggggcgggaagctgtctttatcttctccagaatctgtttcaccgtatcctccggcacggcgcagggcagctctccggcgtcttcttccgggtggtagggaagcagctcctctgtctctatgaccgcaccctgaacgttcagaggcacatccagccacacaggccccggacgcccgtgaacggccagatacaaagcccgttccagatgatagcgtatgctgagagggtccgtcaccatcaccgcatatttggtcatagggcctgctgactgcacgatgtcatattcctgcacccccatactgcggagccccagccccgtacttctcaccgtagtgtcataccgcacctgaccggacagaaccagcatgggaatggaatccatccagccgcacagcacacctgtaagggcattgactgcccccggccctgaggtaacgcacacggccgctaaccggttattcactctggcatatgcctccgccgccatggccgaagcctgttcatggtggttatagatgcacttcagctcctggtgatggccgaaggcatcgtttaaatgcatggcaccccctccggtgacggtaaacacatgctttactccccattgggagatataatctgcaatgtaattggatactttctttttcatactgctgccttcctatttctctttccagcggttctcgcataccatacgcttccctgaggcctgtatgggtatctcatctacgtaggttacacggatgtctgcttcctcccccagatatctgcggtacagccctaccacttcttcttcttttatcttttcacgatctgcatttagaagcagctcataccgggttctgtcccactggatgcattttgcctgatggacaatgccttccagatggatcagtacattcataaatacgtgtatggacagcggctcccctttgcagttgaagagcagagaccctcttctgccgtagatttccgtgagtgtgccgtgtactcttccttttttatctgttttcagctccataatcccggtgtctcctgtatcataccgaatcatgggaaacattttattataataatctgtgacaacaatccggcccagctcccccggagaggctggctcatcggtgtccagcttcaatatttctacataaaaattatagagatctatggtgtatcccttctcctcacccagctgaatggcaataaatccattttcattattaccgtaagagcggacaggagagaaaccgaactcctctgtgagaaggtgatacgtatcccagggaagggcctcccccatggcaaagatcatttccacactccaatcctttacctcgatctgattgcgggatatgtagctggagagcgcggtcagcgcactggagtagctcaccagtacctgtatcttttctctccggatccgcctgcagatacgggccagggcatcatcccccatattggagatgtcaatcatcagcagattatttttaaatgatttccacctgctgatggtattctttcccgggatccatacccggaactccccccttttcatccccatccggaacccattcagttccatgcaggagataaagttcatatttacacggttcattttatcgccgtcgcatatgaccgtgaagggagttcccgtagagccgctggtgctcagggaatatattttccctttatcccggtatccctcacagggaatctcctcataatgttccaggtaatcccccttgttcagcaccgggaaatcctgaaggcattttgcccccttatactttctgtaataaggagaattctccctggcataatccagaagcttttctattcttctgtcaatatattccggggtgaccccctggacaatttctcgtttatttacttcttttagccggttcagctttcccccctgaagggcatccaaaccataaaacgcccaccggcgcaatacttcacctacctgcatattcatcctttcctggctttcgccacacccagtagtattactgcccctaccctgaggcagttggccgcaagagaagcccaggcaaacccaagaattccaaatgccttcgtccctgcagctgccagtaccagcagaagtacaaaatgtgctgcctgcagccacagctgccatctctcatctgtaaaggtcagcacaagtataaataaaaatgccgagagcagtcccaaaatctgcgtcagattggtaaccagaatcagtccttttacagattcatacagattcccgtagaacagccggataaaaatgggtgtggcaatctcgcagaacagaaaaaacagggcactgactcccagtccggcggccaccccttttaagaactgtttcttggtgagggtctctctgcgctttgtcagataggatatcacaatagtattcaccggcgcaattaacagcaccatggtttttccgattaaagaaactacgtaatattccgtaaccgccacatttcccatcagccggttcagcaccaggcgatccatattcagggtagtattggtgataagataagatagcgtaaggaacagtccccggtgtatcaccacggaaaagctggcgcttctggaaaaaaatcctctgaaaacggtacctgagatccccacatacaaaagggccagagattcccccacaaggaaaatcaaaaaccagtttccgcttgcgcggtaaagaaaaaaacctcccagataccccagagaaatcatcagatagtagataaagtacctcttgtagttcaggttcaagcggtattccacatccccgtagtaccgaaaaattgtaatcattaacaatagaaatgtggctagataggcagaaggagtgtgcagttccttccctgagcagcccagcgccgccgcacttcccaccacaccgaagatcaggattgtccagtcataatctccgttcgttaccggataatcccttctcaccaccaggcggctggtattcagtgactggcctacagaagggcagagtatgctgacaagccccataatatacaggagatttcccagctgctctgcccccatctgacggttcagcaacggatagatcacaagctgcagaacgccgttcatcaacagcattccgcccatggtatacatggtattggttataattgttttgttctgtctccccactttcacttgtgatttacctgctttctgtacttcattgccgccggtacttttcacagcggttttcgatatattttctcttgccggactgaagcaccggaatctcatccacatattctatagtgattctggctctctcccccagatggggctggattctccccagtatcaggggctcgtcaatctcatccttattcccgttcagccacagagtgtattcggtctcttccatctgtataaagcggaattgacggaccccacggacgtcccacatattattggtaataatataaggcgtcaccggtctgccctcacagtcatagatgaggtcgcttcttctgccgtaaagctccgtaagaaatagttgatatcttccgtccttcacccgtttccttgcaatggcagtatccccattgtcataccgtatgatgggaaatgcataattatacaaatccgttattacaatacgccccaactccccgggctctgcgggctcgtccgaatccattttcaggatttcataataatagctttccgtgtcgatgtggtatccctcatcctttttattctgtatccccataattccattttcttcattggagtaccaggcccgcaccgggcaggaaaactgcctttgcaaagcctcccggtctgctttgggcagggcctccgagatggggatcacagcctttacctgaaagttctctgtggggatctgatgcccatcgatatagcggctcagctcacccagcgcggaggaatagcccaccagacactttaccttctttttccggatgatatctgtcatctctgaaagggcggtatcgtccagattggagctgtccatcataataaggttttcctgaagcaggcgaagcctgctctttttcacattattcacccagaccctaaggaaagcctctttcattcctatataatagcctcccacagcgccgaggaaaattccccccgctgtgttatggtcaatcttgtccttattctgtatcatccgaagaggcgtccctgtggaaccactggtacacattatccggttatcggaagcctctctaaacacagaggactgaaatttttcatattgttcccggaaggtatccttgttaaccacaggaagctgctccagaggagtatcttccgggtactctttataatacccggtagttcttaccgcgtgggcaatcagcttctgaagcttttcccgagtctcctccagcgaagtaccgtcacggaaccccctgtgaatctgattatagtatttcctgaccttgccgccctttacggcatccagcagccagaagccataccatctcagcttttcatcaatgagcattgcatatcccctcctggttcactgcctcttttactgtctgtatcatataatccagcatttcatctgtcattccgggatacacgccgatccagaaggaatcccgcataatccggtctgtattctcaaggcttcccggaatccggtacccggcacctgcgcccctcatatgatcaaagcagggatgcttcacaagattgcccgcaaaaagcattctggtctgcacgccctttttctctatgaatggtactacccgatttctgtccaccccttccctgcaggtcatgaggaacccaaaccagctgggttcggaaccctcacaggctctgggcagaatcagcttatcctccgcatctgccagccccgctctcagatattcaaagttgcggattcttttttccacaaaacccgggaattttttcagctgggcacagccgatggctgcctgcatgtccgtagctttcagattatatccaaagtgagaatacacatatttgtgatcgtatcccagaggcagctccccgtactgacggtcaaaccggtgtccgcagagattgtcctttccggagggacagctgcagtctctgccccaatccctgagagaacggattattttatggagcaggggattgtccgtatagaccgccccgccctctcccatagtcatatggtgaggcggatagaagctggaagtaccgatatctcctatggttcccgtgaatctcttcccgccgttccacgtatataccgaaccaagggcatcgcagttgtcctcgataagccacaggttatgtgtttcacagaatgccttcacagccttcaggtcaaagggattccccagggtatgggccagcatcactgcctttgtcctgccggagagagcttcctcaagcccggtcacgtctatgttgtactggggaatggtgacatccacaaaaaccggtactgccccgtactgtaccacaggggccactgttgtggggaatcctgcggccactgtgattacctcatcctccggccgaatctgacgttctcccaaaagaggggatgtcagggccataaaggccagcaaattagcggaagatcctgaattcaccagagaacagaagcgcagtcccagatagccggcaaattccttctcaaactgttctgtgtatcttccggaggtaagccaaaattccagagcgctgtccaccagattcaccatttcttcatggtcgtaaactctggcggcataggaaatcctgtctccggggacatagtccttctttttattatggtacgtatcacagtaggcactgaccatctccaggatctggtccctggcctgctgctctgtcatctgttcaaacatgattctttcacctgctttttccaatattcttttatctgctgttccatcactgcagcagcatcctctcccgccaggtatgccttggcccacgccacggttttttcaacggcctcctgcacatgccataccggtttccatcccagttccctcttgattctggagcagtccagcttcaaaaagttcgcctcatgggggccatcctgagactggtttatccaagtctgctcttctccccaggaccggcagaaaatatcggccagctgccctgtggtaatgcagtctccctcctccggccctacgttatagcaccctgcaagaccgggatccccgtattgcctctgtgcaatcaaaagataagcagacaaaggctccagcacatgctgatacggcctggtggagcggggattccggaccagtataggttctttctctttggctgcccggatacagtcaggaaggatgcggtccggcgcaaaatcccctccccctatgacattgcctgcccgggctgtagatacgggaatcccggcttcctcaaggaaggactgccggtagctgtgggttaccagttctgagcaggatttgctgttggaatagggatcgtagccgtccagctcatctgtctcccgatatccccactcccactcccggttgcggtataccttatcggtggttatattcaaaaatgattttacacaccctgtcttccttacgcactccagaatgtggacagttcccattacatttgtcccgtatgtggatacgggattcacataggattccctcacaataggctgtgcggccagatggaagacaatctccgggcgtgcctcctccacggttttcatgagaaggggaagatccctgatatctccggtaactgactgcatttgtctgccgatcttgctgacagcaaacaggctggggtctgtagggggatccagcgcatatccggtgacaatggcccctgcatcaagcagtatcttactaagccaggttcccttaaaccctgtatgtccggtcacgaacactctttttccccgataaaattctatatcttccattagttccacaccttccagggagctctgcctgactgccacatctgctccagcttttccttttcactcaaagtgtccatacactgccagaaaccggtatgcttataggcattcagctggcctcttctggctgcctcctccaggggatatctctcaaagatggtgtcgtcatcctgaattaaattgagaatctccggttccagcaccataaatccggcattgatccagccctcatcctcttttttcttttctttaaaattggagatacttccgtcgtcctggatgtccagcacaccgaaacgtccgctgggctgggcagacgttatagtcgccatcttcccgtgggactggtgatatgcgagaagcttcccgatatccacatcggcaactccgtccccgtaggtgagcataaaggtctcctcattcagatactcgcggatccgtttgatacgtccgccggtcatagtccgcagtccggtatcaactaccgtcactttccacggttcagaaatgttattatgtatgattcttctgtttccctgtgtcaagtcaaaggtcacgtcactgttgtacaggaaatagtgtgcaaaccactcttttatcatgtgctgcttatagccgcagcagatcacaaattcgtcaaatccataatgggaatataatttcataatatgccacaggatgggcttttccccgatctccaccatgggctttggttttagatggctttcttcgctgattctcgtaccgaacccgccagccagtataacaaccttcataggatacctctgtcttatactttttcttttgttatattcacttctgcattcctgcagtcctttttagcctttgaggaataaacaactaatagtataatataatactttctgtagaaaaaggaagaggtttttttcattttatacattttaatgacttttttcgtctagattagaggggatattgttgtaaaatgcctgattttagttttatgtatgtgaagctcgaggtgaaattgtcggcgagcgtattgtcgcagacggacggatataggagagagcatcggggagacagggccaggccaggccgaaaaaaatgagcatgggcagagaatgcacataaagcattctctgcccattcgaaaggtgctccggcggggaagcctcaagcttaggaaatcaaaccccaaacaccctaatttatctcgtcttcgtccaagcgccggaactattcacataatattttcccacccaggtattgcttgccatggctccactgcttttcaagtaataccaagtattccctagtttaatccagccggttgccatagctccgctgctctctagataataccaggtattccctagtttgagccagccagtcaccatcgccccgctgctcttcagataataccaggtattccctagtttgagccagccagtcaccatcgccccgctgctcttcagataataccaggtattccctagtttgagccagtcagtcgccattgctccgttactcttcaagtaataccaggtatttcctagttggatccagtctgtggccatagccccattgccttttaggtaataccaggtttttccttccagcagccagccagtctgcatgataccgtctgcgttacagtaataccagacctttccgtcaagaatccatcccgacttccgatatccttcttcattaaaataataccattttccgtcaatgagtttccagcaggctttgggatatgtgccgtcaccgtaacgataccaccaccctttactgtcctgtatccattgtggtttatctgcctgcttttctactgtcactaaaaactctcccgtcatatttctataagttaccttaattgtcttcactccgggagcggaagaatcaaatgtactcaacgaataatcggtaactgttttcttcctgccgctttcatagcaggcagttactgacattccctttgtatccagcttatcgccaactttataaacggtcttatcaggcgggtcaacttcgatccctgtcagaacaccggcaccagatgtcaggaaaacgaccattgcggaggcaccctcaggctgttccccattgttcataacaaaataatctctttcagaaaaatcagcatcttcttccaattttgtaaatgtaatgccgggcttaccgtctttcagcattttaaagtgaagtgaagcaatctgtataccatccttatccgcatcaaccgttttgctggaagataacggattgacatacagtgctgccgacagccttcctttctgtatatctgctttcctgctaagaacactaaaatatccagtatcctcactttgattgtactggttttttacggcaatgagttcagacgcttccacagattccccaccagtctcagtaactgctgtcattgtcaccttgtcatattccagtgaaaatcctgcggtattaaattctgcattcctcactacaacgtcggccgtaactatctctcctgcctcataccagtcctgtccgaagctcacctctaaggttggtacttctgcagctgagacgagagagggaaatgccgctgcaaataataacaaaagtgacattgccagatagcctgcatattttctcttcaaattcagtcccccttacttattgtttgttttctttttcctgtagtaaataattcccgctccagctgcagccactagaattagtcccgcacttgcgcatttggtataagaatccttcttctgcttgtccttcttcttattctctatttcctttccagcctcttcaatactctctccctttaacgtctgttccccgtctttatcctggatttctccggaagtatccgggttttctttttgatcggagggcttttgggaagcctcacctgaagcattgttggtactgctttcctcctttttgggtttgtctgaaccatccgccgtttcttctccggcttcctcatccgcctcctgtgcctttggatcgctgctattttccttttctgccgcatccgctttctcaataaccggcttgctgacatcttccttctgtacggagattccgccgtactgtacttctgcctctgccgtctccatctggcttccgttattcaccataaggcacgggacagcgtaaaagtctgcgctgtcctttacaacagcaaactttacatcaggttctccggcctccagcatctgaaaggacagttccgcaaccagcataccattctgatccccggaggcagtcttgcctgctttggggttcacatagaacactgcggttatagtccctttcgatgtatccagcgtacgatccagcatagaaaaagtcccggcctccgcattctcatcatatggatctttaagccggatcacttttcccggtttatctgatgtggtcccgtccccggttactggggtcatacgtttcgtattatactgaagagaaaaacccgcagcattaaattcagcgtcataaatatagatttccgcagttacaatactgcctttttcatagctgtcttccgctgtcctcagcatcattcgggatgttcccgccgccgatacaggcagcggggtgaacagcgtcaggagtaatgccagtacaacactctgcagccgtattatctgtctattcttcttcattaagccctcctactccattcacatataaatgtctctgcccatctgcccgcaggaaagacgttggcgtcttccctgcaggccctatgctatgaaagctttgtgccgtaattgctcagcagaacagaaaaatcatttgcatttacaacaccatcaacggtgatatcgcactgtatatcctctgttccataaacggacagcatctgcgacagatccgtgaggttgatcctggcatcaaagttaacatctccctttgaccagagatcgtatctggcttctgccatttcaagagtatccagtttttccacatacttcttttgtgcttctgtaagggcgtcatatccgcttcgcgcctctttaatagcctccgcgcgatcaagggttactgttccgatagcctcaataagctgatctactgccccagcagcttccatatctgctaccacagaactctcaaaagccacttctccaaaggcatagatatgcctcccgcctgacattacagtcacactctcatcgctgaaatccacatcatcctccatggccgcaaatgcaacagacggggtgccgtcttccatcatcataaaggtcacggtgtcaaacacaactccattttcatccggtgtaattgtctttccctcagggatgtagacagcgcgcatcagtctgcctgcattcttatctgcatccgcccggagatctttaaatccatcggaagcatttgcagacatataagtcataagtgaactgtcatactgcaggctgtatcccagggcgttaaccttgtcgcctctgtggagttccatttccattgttaccaaatctcctgccttatagaagtccttttcaaaagaggctttgaccacagcactctctaccggaatcacaatatccggcatacttcccagaagtccgtttctcatggttgctgtaaaattctggtctataccattaagtgtcactgaacggtgctctccataaggagaaccaaatcccatgacattaaacttgccgtctgttaaagcaatcgaggaatccttataatcctccggtattgtaaattcgactttttgagtctgataaccgaaattatactgaccgcccccgctcttgacatcggcgccatttactgtgtatttgattgctgcattcatattgtagatgcctgccagcttgttcgccgggcggaatactggtccaaactgtaccgtcacggtttcaccgggacacggggcttcaccctcggcatattctgttccgtcatctctcagcagtttatattccagttttttcacctttatggtttggaattcctgttttccgtccttttccagacgcacaacgttggttcccacaggaagaccggtaagggtaacgattccttcatcggaagcggtcacaccttcgtcagtaaatccggtgtaggatgcactgttttttcctaccgttgggcgggctactgtaacattcaccccagatgtaggcttaaaggagtagtctgcccccttatctcccgtaaaataaataaagtccaaatcaccgtcaaatacatcaccagagagctttggtacgatgccatagctgtcgggttctgtattgagtccttcattgatcgtcataccaaggtcgattccgctgtcttcactctcccctacagatacaatcactactccggtattctccggccaaatagcagagaagaatgtaaatcctccccccgatcctcctccgataccagttgtatagcacgccttattgatcattgcgtcataggttatcaaaactgcggctgtcccttctccctcagcggtaattaacccggtttcatccacacggattacgctgtcagatggatttccgtccagatctactacctgataatggaaatcaggaactgccgtcttggagttgataaaattttcaatggcctgccagcttctcatagcaaccagctggaaggtctcgttcttttccatcttcagataattctgctcattgacattcagcagaagatctcctgtttcatactgattgtactccagattgcggtttacagtctttgcattgacatcaatcacgtctccgcccttttttacctctacagatgtaagccagcctgcatccacagcaacgtccatacttttgctaaatgtaatccagtcccagtatgtagcgtcaccctcatggctgacacggtaataataggttcctttgtttggtttgtaacgaacagtaaccgttccgtcttcatttacaactgcttctccctccggctgtatgggtgtgtataaataatattttgtaagtgttcccacctctaactcatattcctctgagggcagagtaaaggacagccatttgatctcttcgacagccgttacctcgttgcctgttgcgtatgcgtatttgttcactactgtagtattatatgccgccgcgtttttatctgtaggtatcttccagagctcatagttatcatatcggtatacaagaaacgttttatgtccctcgtccacagaatcacccatagagtaattcgttctgttttgaatggatttgagctccatcgtatagtcatctccatacacccatccatcattgggtgcccatgccgtgattgtatcaatggtataggactgtgtttcactgtctgtaactgacaatcctatggttccattgactgtggttccgtctgtgccgtagccggttatcacatattctccgggagaggtctgaaacgtatatttattattactaggctctccgatttctatctgggaaccgctttccgcttccgttacttccattgtagttgttactgcattcagaactaccgaaacctgcaccataccgtccgtattcagaacattttcatccgtactgaaaagcgccgcaggttcctggctgtcggcttcttcctcagtctgcacaccgtccccatctggctccccaatagtttcctgcattgtgcccgtatccggcagagcgtctgcaagcacctgtaccccggtgcagcttagtatcattgccagcgtaagtatcagggcaataaatcgttttgtctttttcatcttttttgtcctcctttgattgagtaaggtacctaagtctaaattttagccccgtagttagtgagtaatatggagaagtcactggcgtttaccgccccgtccaaagtaatatcgcactggatgtcttctgttccatatacggacagcatctttgacaggtcggacagattaattctggcgtcaaagttcacatcaccctttgtccaaagagcatatctggcctccgccatctccagaacctccaaatttctaacatacagcttctgttcgtccgccagcccgtcgtatccgctgcgtgccgctctgattgcttctgcactgtccaatgttacggttccgatggctgcaatcagatcttctactgtttttgccgctttctcatcttccactgtggatctctcgtatgtcacatcggtaaaggcatacatattggttccggatgacattacacatacactctgttcagagaaatccacgtcatcttcagatgtcacaaacgcgacagacggtgtcccgtccttcgtcatcataaaggacaccttatcaaatactatcccgctttcatctgaagaaacgtctttgccgtcgggaatacagactgcacgcttcagatttcccgtattcttatccacatcttccctcaatgtctcaaaacctgcggcagctgttgccgacagatatgtcataagggagctgtcataccggaggctgaaacccagcgcattgacatttccggcgccatacactgccacctgcatgggaactgtttcaccagccttataataatcctgtttaaacatagcttttaccactgcacttgcctggctgcatgcctcttccggagaaaaatctcccgcagctgttgatatttctatatatccaattccattctttgcaccgcaccctttcagccagtaattgctgtcaatgacattgtactggttcacagacttcataaatcctataatgcctcccaagtatgcattttcttccgtggcagagacggttccggtaaaggtgttcttctgaatgtatcctgctccgtttgtccagcagctcttgcacaccggttctccgccaaagatcccgcctacatcatttgcaccgataatagtaccgtcagatgaactgttctgtatgctgacacagggcgtattgggagctgaaggcgatgcatatcctccccccacaatgcccccggcaaattttccgcttgctgtcacctggccgccaaagtaacagttatccactgcgcagattcccatggcctgtccttttcttcccaggataccacccacataatctgtgccgtaaacagaggcatagcttgtactgttgactaccctaccattatagtccccggtaaaagagcctatggctgcctgatctttcttatagcctatcacaacgtctttttccaccgtacaattctgaatcatgacggtatttgcacccgatgcatagcctcctataaatccagccttcaatgtggatgaacctgacttcagagtacagttgtcaaaggtgacaacctgaggagaaccgcctccccagtagtctgccttaggtccgtagtcaaccgtataaccgtctgcaaatccatatccctcaatctgctctccataaatgttcaggttccggattaaggccccacgcatgtaataaaacagtgttctgccgccgggctgaatggttatggtatagccgtctccgtcaaaacagccggaaaatggccagatatttgtaccacttcccgtattggaagctccgggcttcagcccgccaatatacccaaagtccagaggcagagtaagatctccggtaagcttaaaataactgtaggcaaggaaataacctttatcatttacacattcctgtatcttctttaaatcttcaatgctgccgataagatatgggtcctcttctgtaccggttccctcccagagttcgcccgttacggcctcaaggtcagagacagtaatggcagcagcctcagtgtcagttgattctgacatatcctgccacgacaccgtcactctacagtagtagtaaaatgtcccaacctcttttgtaggaggagaatacgttgtcccggttgccccatctaccgctgtaaacgtttcgttatccgagcttacataccactgatacgagacattgcttcccgccagcgcagtcgctgttactgccagttctgcagggttctccccttttacatattctgcgtctgccggctgtcgggtaattacaggtttatccagatctttaactgttactatgacatgaaccttctcaaaggtatctctggaatctgtaagataagattttccatccgtctggtttataacaaaagcaaaataccagccctctgatacttttgaagtgtccggcacaaagtcctttgccgttcccccggctgaagaccagccgctgtctgcttccggtcctgtgcccttattccattggtaggaaaagattcccccctcgggccttgtatgctccattgtaataggggacgcctcttccccaacatagtagattagttccttcccggcatcggggaagtctgttatttgaggatagaacactgctgtgtctccctcgatcagagctttgaaatcctcctcagccttagtaaggacctccaggttggaaactcctgtctgctgttccggcaaaagagcattatatgcctcccgggccttatttatatcttttctgctgttgccgtgtacggtaccaatggcatcgatgagcacttttacataatcgatctccgcggcagacagtaaaccgtaatttttgaccgatgccttctgttcctcagtcagggcatcataggctttcctggcggactcaatggcatctttactctctgcagatacctctcctatttttccaatcagaatatctgcggccgacgcagcgccatctcttactttttttagtatataattccggctttctgcattctgttcttctgacccgtagtcggcctctattctaacctgcatttcatccctggagtcccatacaggcaccagtgcaaaaggctcctggctgactgccctcttaccgttgatggtaactgccgcatcaaaggcgtcaaccgtcacattgactgctgccgcagtttctgagatatacactgtagtatcgacaacaggagcggcacttccgttatcctcagcaaaagcaactgtgctgacagctgccctgcgtatcacatgtattacatattgctggctgtccgtttctgtgcctgcagtaaccgtcacggtattggtacctcccccatttttccacataccgctgttataggtatccgtatccgcacttgagcttatagttctcgaccaatcctgatcgaacgaatagctccagaaatcaacggtaattgtacttccggcgggtgccccgtcagaaagcagtgcacctatatacccgcgtgttccggcgtctgccggtactattacggtataatcgtggctgccgctctcaaagccttccagcagttctattctttcgttgcctgcggcaccgctgtaactgattcttaagtcgtcaagatacccctgtgcggacggctcctgttctgctttctttacagtaaacgtataggtagaagctgttatctctcctgtgttcatagtgggccatgaaggatcgccgcactttacggttattaccgttccatccgtcacaggtacctctgcagttctcttgtattccgtcccgtctgctgatgtgcgtacctgaaaatttttattggctgccgtgggggtaataaccaatttttctgtttccaccggtacggtaagtacatagtctgtcactgatgagtcaaaaatcttgtccagctcacctgtcgaaaacgcaatatccgctacgcttgtgtcgttgttggcccaggatccgcccagatcctcgccaatatgctccatatcgcagtttgagtacattatccggatctcatctccgtcctcaaccgcaaacttatcgaagccctcattggtaaaccaatcgttgaacgttcccatccagcccgatccgtctgctcctgcctgctgagacagaccattaatctctgacagatacccgctgtccgcccctgtctgtgtataacctccttcctccagggcataagccacggctgacataattgtgtcaccgtccgcggtatccacccatgtatccaccagggttccctcccacggggctccgtcagcttcggcaaatgtagtgttttctactactacatgcacctgtctctttgatgtgtccctgtctgctgcaaacgcagtggacggcagtgtaccgaacagcatcagtatcacaagcaccaaggacacaattctccttctcataacgcaaacctccttcatgatattttctatatcaagcgcataaacgcccaatatacctcctttttactacaaacgcttctaaataatcagcaacaaaaaaagcgcccactactaaaatagtggaacgctttgagttaaaattcatatcgttatccatgtcctatttaccatttgcccataagtgaattctacgctttatggcaggtctcctgacttatggctatgacagaaactgtcaggtaaaagcgccttctcaagcaaactgctcaatggccgtgctttccccttcaccaaatacagtaatggctgttgtaccggattctcaccgatttctcttttcatccatatatcttgcgattacagacaccataaacgttactatatgcaatttggaaaatataaacattttatagacatattataccattctttaggaaaatttcaactattaattttattatacctgaagatattcagatataacccaattcttatacacatttccctttttcatggcttccctagcatcctctaacctaatccataagagtttcctcaaatttggaacaaaggaaatgcacatacctgcttttcctgcataaccttctcctatcggttgcactcttttaacccatacgtttctatcttcttaagaacggtctttcctccgcagctgcacagatatgtctcattttgagtgctgcccgcataaatatttaaagaatgattattccgatactgattggcaaaaacttcaacagagctctggtctgataagatatgaatatctaattcttttttatcctggagatataatgtgctctcagacactcccttgctccagccatctgagttatttctatccacggacattttactttttataaaatcaaaggtacataccgtctgctttccctctccgctgcgcagcacaatctccaactgttccgcatctgtctgttcaagatcaaccttaagcttacactcaaaggatacgccgtctccggcttttactatagttttttcttgctttattactatgtcttcctgctgccatgcatctgtgcgtattgtttcaatttccctgatcggcacaaactgtaacgtatgatcttccagaagacgtacctctcttggaatattataagagccgcaccatccctcccggtaggtcggtccccaatccttccaaaatggcatccaatcccacgcatttgcccagccgacgataattctgcgtccgtccggggcctcaaatgactgcggtgcatagtaatcaaacccccagtcaatttctccattcacatgataatcgaatttaccggtctcatagtcaaaatcgcccaccaaatatacaacggtacgctctcctgctcccattggtgagaacataagtacatatttgtcaccaataggataaaaatccggacactcccacatatagccccattcgccccggctttcagccagaacattaaagaactcccaatgcagcatatcctttgagcggtacaaaagcgcctgtgctctattgctgcggcttgctccgcataccatataatacgtatccccatgtttccagaccttgggatccctgaaaaagtcggtaggtactccctctggtgcagtcagtaccggattcccttcatacttttcaaaatgaatgccatccccgctataggcaatacactgtgtctgttcaaatccatttccattattagccgtgccagtaaacatcagaaataatttcccgtcatgctcgatcgcgcttcccgaaaagcagcctccccgcagatgattgtcataagcctcagagggtgccaatgccagcggcagatactcccaatgcagcatatcatcgcttacggcatgcccccagtgcatacaatcccagaatccgtaatagggattatactgaaagaaaaaatgatattttcctttataatagatcagtccattgggatcattcatccaacccgtctggggcataaaatgataatgctgacgcatctcaccatttttaactatctccttttttgcatcaatctcctgctgggccttctcaatattctgttgcatcagttctctagacataagactcctccacgttatctatattcatcacgaagttttttggcaaattctgtattaagcttagactcacgacgtgctttttcttcttttattctgaattgtttctgtcttgcgggactgtattcttcccaacgatttgcccatgactctcttgcggccttcatctcatctgtcatctccggcagattaagttctcttgaaggcagagtcggaacattcggaagtctttcttccacgggaagaatcgtaatttccttacttgtgggcagggtctgataccaataagcggtagaactccaatcgtcagataaatgatttgcatgtccatgctcaattgttacccttaaactcttttcaaagcgaacgggatccgtaatatgaaatctgtatgatacctggaacccgtcggtatcgccctcatggacaattgttccaaagaatggatatgcatttctttgcattccccaggcatgattaaaatagtcctctgttcccgtgccgttaaggcttggatattcttctccgtcaataaagaacatatcgttgccctcgccccaccagcttccctggtaatgcttcactgtcagattacatcccacataatggcccgtcccctctacatccagaaccgtataattcccttcgcctttcaagtttgttacattatttacttcgggcgaattggtctgcacatccggaccccatccgtcacagggattttcacgtctccagcaggcatgaaaatatgcagtctcttcgtccaaaggctctctatacatctcataatcaatattgaaatataagatgaatggcaaatcattttcattcacgatttcaatctttgcttttttattaaatggcatggggaaataacatgatacagagcagggtgccccataacgtccggcttcttctggttttagagatacgttaaacggaagagagctaaagtttcccggatagcagttacctatacagaagaaatctcccaaaggcgcaaggacacttggagtatcctgatcatcccatgttattttaatcagtgcctttctataataaaagggatcataatcatcccagataacaccaagcgccgggtgaatctccataaccggagccgcagatgcattcaggaccgggtccagaatacttggcgcctttacttttcggcaggatgaagtcatccatatatgtgtgatgcacccaggcccttctacttcacccagtacaatgctttctttcgccggtatctcccagtaatcctgatttttccctctctgatcccaacttgcaagtcttccgtttctggctttcttaattgttgttaaatcctgaaataatcctgatactttactcatagtttattctctccttttcgttttagccttttactgcgccggcagtcataccctctacaatatttttctggaaaagtccatagaatattaattccggaataatgatcataacgcttgacgccacaattccaccgtagtctacggtatacgttcccttaaagaaggatgcacccatggacaatgtataatccgaagcatcccttaatataacagatgcaaacgggaattcattccatatataaaggacattaaatattacaatcgtagcaattaccggttttgtcatgggcagaatcaccctcatcatcagatcccatatagaacagccatctatgacagccgcctcatctatctccgcaggcaatgccttcaaatatcccaccaacaataatgtattaaacgaaatagatgttgcaacataagggaaaattaacgccatctttcctcttaatcccaaaaacacattaatcttatatacaggaaacaagagaataaatggagatatggacaatcccatgattaaaaacccatataataatttccttgtttttgcacttttaaattccattcttgctaatacaaacgagcttaaaaacgtaataatcagctctgtaaccagggaaacagcacatacaaatatggtatttccatacaatttaggaaaattcaatacctccagtgcatgcttataattgtcaaaattcagtgtctttggcagggacaatggcgaagataatatctctgaatttgtcttaaaagagagaatcagcatccatataaaaggaaatacaaccagtactgtactcaatgccattaaaacatacatacctgtcctttttcttttattgatcatatcctatccctccctttcccttgtcagaaccgaataaacagctgttatcaaaagagaaagtaaaaacgtcactgtcgccagagacattccatatccataatcactgctggaaaacgtctgtgaatagctgtatgttaccagcgtctctgataaatgattgggccctcctccggtagtctgctgaacaatttcaaagatcttaaatactcctgtgataatcaatactgctaccgtagaaatcgttgtccgcatcatgggaataattacatagcgtatttcctgaagaccacttgccccgtcaatcttaacagcctccaatatatccatgggaatcatcttaagccctgcgataaagattgtcacaagatatcccaattgctgccagaaataaataatagcgatactgtacggtgataaagactcaccgccaatccatttttgtttcagcgcacctgctcccactgcgtccaaaaggttatttaaaataccgatattcggatccaatatataaacccatatgatacctacaatgattggagcgataatggccggcgaaaaaattaatgcttttgaaaggtcaacggctttaagcttatgattcagcagcaacgcaatcaaaaaggacaatgtaagcaataacacaaaagccagaataaacataaccatcgtgttcctgaatgagctccagaacaattcatcctgaaacagccttacataattttttatacccgtaaatcttggttttccgattccggaatactttgtaaaactatagtaaacagcaatagcaatcggtaatataataaaaacgctgtacacaagtaatgtgggaatcatgagaccaattttatatcttttcttacttaaccaatgcatacggttaccccatttcttacagaaatatctgccagatgccatttcatcctaagcagctggcagaatccttatatattactgactgtttgccaatgctgtatccatcttatccagcgcttcagcgggttcatatgttccctgaagtactccgaaaatcccatcatacaatgcttcctgtactgccgagcgaacggtaaggtccggcgctgcttccggactttcccagccatctgcaagtgcttcaagcattgcgttcatagcatactgtgaatcagatgctgccacaccctcataattggttgccgggaaaatagagccttcataggataattctgccgcttcttctccataatagaagctgaggaatttataaacaccctcttttaaattatcgttatccgcaaccgctgcactgacaccaataggtgcagacggaactttcatcgcaatattctgttccgcctgtgtgtccgtaaactttggtccccaccagaaaccaattttatcgccaatgttctcatcaaactctgcgcaatcccactggccggtcccgaacattgctgcacttcccccgtcgaaaagctgtttagcatcaaaatattcaatggtcgccatgttgtctgggaaagcacctgcgtctttcaggccctttaacttttcaaaacaagcaagcagttctgcattattaaatttatctgatccggatagaatattctcaatattatcttcccacccatatctggccagaaattcattaaactcccacatggcaaaaccactgttcttacttccaattgccaatggagtaactccacttgtctttaatgctttgatcatttcaacaaactcatcataagttgtatcatctgtgggataagaaactcctgccttatcaaagagttctttgttataaaatataccctgtacgttacattgatatggaagaccaaattgtccgttatcgtccttaaacgctgcctccattccccccagagccttcttaatctcagtattttcatctaaaaactctgtgagatccatcaacacacctgcttcactgtactcggaagcttcagatccctcaatccagaaaatctgcggaagtgttccgtcttctgccttcagcttcatattttttgaatgtgtttctgtgtcagccgcctcaaattctactttgtatttcccttcatttgctttattaaatgcctgcacaatattatatgtaaccggctcctgttcttccgggtttgccacatgaatgccaaatttaataactgttgcaccgctttcatctgttttagtttcgttactgctgtctccgcagcccgccataaggctcaatgacaatgtacttaccaacattgcagaaaaaaattttctaagtttctttactttcataattatcctccttaaaattagtgttgtggaacccgttccatacctgataaaaaaataaaatatgtcccgaatctttttgtaagcgctgtggaacgcgttccacaacacttacaacacgaatgtgcactattcgatttctttaatctcattatattctttcattccccgatgtcaatgtttttttatgtcttatacaatattttgtacataattacaaaattttctaattactttttgttgcttttctcttaaacaattgttgtttttctcttctttaattctacattcaatataatatttttgtctttataaattttgccattaattaatttacaaattaagcgggcagattcttttgccagccctcctattggctgaacgattgctgttaattccggttcaaccatttctgtaatatatgttccatcgtaagccacaaattttacatctcttggaacctttttatgccttcttattacttcattcatacattctatggccagcctgtcaaccccaaaaacgccgtcaaagtctatattttgggacataacatcctttactgcctctctgtaatactgagcgtccagccgattccattccagttcatagcaaattgtccggatattattttccttcataattctctcgaactcataatgcctctcatgatagggagattccacctttgtattgccaataaaatgcaaaatctttttacatccattctcaattaaagtttccgccgcaagccttccgccttccttatggttaaccgctaccaccggtatctcttctccaaggtaacgatccaaagcaacaatcggcttatggattctcttgtattcttctaccttcaaagaatggacgcctgtaattaccccgtcaacaatgtgccgattcagcatatctaaatattccagttcagcattactttctttttctgtattacacagcatcattttaaatccggcattatacagctctgactctacgcaatccacaaattctgcgaaaaaagggttagagacattcggcaccagcactgcaataattcctgtctttttatgataaagattccttgccagctcattcggtgtatagtcgagctttttcattgcatcttcaattttcgttcttgcttcttccgatacataaccactgtcatttagaaatcttgatactgtaccgacccctacccccgcctcttttgcaacatctctgatgcttgccatatcttttctccttctttcttatctgcaaataattgctgctataacgaagtataattcccgtgaaatcaagttgtcaatatacattttctctattttgttctgtaagattcacagccatccggcgaagggtgcaatattctgctttttgcgcgaatccccgtgtattgccggaaggacatatattgtactggatctcacaagcacctgatgatagaataaatacaaaataatagcaataaccgagccaaatatgataaaaagactggatatgaggtgaaccgatgagtggatatgacatccgttttgtagacaagattctggacaatgtacatggatttattgaatatactgctgtggagaaggagattatagagctccccgtcttcaagcgcctgcagagcatcaagcagctgagcctgaccaattggatctttcccggcgcagagcatacccgttttatccattccctgggggttatgtacattgctgaccagatggccatacagctgaactatacaggggaggagcggcagctggtgcggctggcaggccttcttcacgatatcgggcactatcccctctctcatgtgggagaacaggcttacaaatcactcccccgggatccggaaaatattcttgtgaatcagaagcacaaggtacaaaacagtctgaatggcctggatcatcccagcctggactacatgcaggaatctcccaatccatttcaccatgagcacattaccagagaagtcatccgccatgatgaagatattattagaattattgagaaacactgcgggggatcctccctgattcagattgataatatttgtgacattattaccggaaatgtggagcgcaatcccggcatctctggcctggtgcagctgatccactcggagctggatgccgaccgaattgattatattatgagggatgccaccttttccggaaccagctacggcggctttgagctgggtctgtttctcaggagtctggccagaaccaggtatcaggatgcggagatcatcggtgttcactcgaaagggatctccattgccgatcagtttcttatgaaccggtatttttcctacactcaggttttctttaaccgccacgtggcgatcctggaattcatggcccgttctctgacggaggtgtttatttccaggaataccagtgaatacccctctccggatgtcctgttccaatatgtcaaaaagcacagtgggaagacagaatttctgtatttcacagaccgggcattctgggacagcctgcatcatgtatctatggggtattccccttatgcggatatctttcaggagctcctgctgaaatatcaggagctggatctcacagagaacagggaaatatccattacgtttaacagcaaagaagaattaatgaagcgtctggaagaacatcccatctatcaaaacctcctggatgatgcctgtgagacagttcccatcctgcatctgggaaactttaccggccagctgccccgggaagtcttctgcagagagcttgaacgtctcgggaatacctctggcctcacggagggggatatccggcggatgaagatacggcggatgcaggaaggcattactgtaattgaagaggggaaagcgccttcactgctctgtgacagcccggcctcccttatgtccggcctttattccacccgtttctgtatcctcagagaatacgggcttccccgataagggaagcccgtattcattaagcatctagatgcatttttttcgaaagcagacgatcccggctgctcccagtatacacaccagcagccagacaggcgccttcatgacgtccccggtatctgctgtttttgcgtacccagtcttcccatatccccatacccctgagggggaccacacgcctgctctgttttgcccttcttttggataagcaggttgttgtgacccaggttcatcaggaacgatctccctgtttcattcggcgtctgccaccgcaattccataggtaaggctgccggtataggtaactccttttactgtcgtaggtccgatctccggaattgctctgtatgtctttgtcccgtcttctgtgaaggacacaatctcctgtcctttggccacagatacgtttgcaatggactctattaaggtgccgtccggtctctgaatcttataccccaggattctgtttattccaccggagtccctgccgctcaaaaccagctggtcaaaagaaaagtctgtccctgccacggtcacggaaaccttctgcccatcctgaagattatttacatctgtcactgtaatatccacgtctgttccatctgcagccatagtaacgctggacggaatactgaccgtataggaaggctcattggttactgtacaagtgaattgtgtctctgaactttccagatttgccgcgtaaacagatccggatgtccctaagataaggcccatggttaacactgctgctaatttttttctcataaaaatatttcctcctcataatatatggaatttgcagacggaggcaggaataactccctccggacttgctgttctattaagacagataactcccgggcggatatctgtattaaccgttcctgtcactgtactgaaagattggtatgtaccactgcattattcatcctctcctgcgtatccagggaaaatgtgtgaacctgaatcgctgcctcatgttctcctgcctccaggcctcgggccagcgtaagattcttaatggcttttcctggttcgataaggtctgacgtataaagtatttcccctgtttcatccagtgcgataacaaactgaaaatagcaggggttttcttctgggttagcaagggtgagctgcacctctttttctttcgccggaaaagatattgttccgtatccgggtatcttaatgcctggggtttctgcctggtcctccagctggttttcccaaacctctgcatccgtatccacaaccatgccgttcccggtttgagcaggaggaaccggggaaggccggaaaaaaaaccagaacacgccccctgcaaataggagaactattagtagagtaactattattttccgcctggtaatctgcattttctgtcacttcctctcttttgctgagacaagtatatcccggacaggttaaataccttgtggggatggggtaaatagcctgtaaaaattttacataaatcctattgactttgcgacacttatgtctcataatatagtgacacacatgtcgcttataggaggctgtactatgggagaaaaaggcagaagaaccaggcaggccatctgtcagagcgcctgtcagttatttgcagaaaaaggatacaaagatgtgacaatgaaagatatctgtgaacgcacgcacctgagccggggaggcctgtaccggcattacgggagtaccagggagattttcatggaaatcgtggacactcttatgggacagcaggcagaggatttcagcgggaagatggaaaagggcgttcccgcaggtgacatcctgcaagatgtgctgaaacggtatgaatgggagatggcagatgctgagaattcattaagtatcgcactgtatgagtttttcagcaaccctgaatactccggggacggacgttctatgtacgagcagtaccgtcagtctgcagagatgtgggagcgtttactggaatatgggataaaaagaggtgaatttttgcctgtggatacggaggcggtgatcgacttgatactgttctcctatcagggggtacgcatgtacagcaagctgatgccggtagatcccaagataccgaaaagaatcctcagccagatccggctgatgctcacaggaaaggagtgaacccccatgacatctgtattttatacaaaggagctgccttctgcagcagtaattaacccggaagactctgtcctgccagtaaacggttttccggaggtatgtatctctaccttttccaaagctatcattgataagttcgcatccatggacggcgttcggattattgcctggttatatactgccaacggcagaaatccagtctatgagatcacctacggaggcagaagattagccttttatctctctctggtaggtgctccggcctgtatctgcgggctggaagagatcattgctatgggcggaaaacgctttgtctttttcggatgctgcggagtcctggacgaaaaaaaggtggggaatcgtctgatccttcccaccggagctgtccgggatgagggcaccagctaccattattatcccggagatatccagttaaagcctgatgcagcgagcagcctcatccttcaaagctgtatggaccgctggggctgtccctatacgtccggaatgatttggactacagatgccatataccgggagaccgccccccggatctcagagcgcaaaaaagagggctgcattgctgttgatatggagtactccgcactgctggcagtatccagataccgaaaggttcctttcgcccagtttttttacggtgcggacagccttgacgggggcgtatggcagcccagggatctgacagattacggtctttccggagcagataattatatggcacttgcactggaatgcggtctggcgctctcgtctgcaccctaaagcagaccagaaagcccccccgcatccagcagtttcagcccccggggatttctccggaaatatcccagggcctccatcttctttagttcctgattcagggaagatctgcttacatgcagcttgttggcccatacagtctgtgacacagggaggggaatctgtccgtcctcataaagatgatccatcccaaccagccaaaaggccactctctgacgaatagtctgataattcagacagttaagctgaagctgattcttcagccccctctgagagacgtagagaaggagtgagtacatcatccgggtatcctcctctatcatctcaacaaacctggaggcaggcatccaggctactgtagttcttttggccgccaccagattataggtgtaggatctcctgccagagaagtataaaaattcaggtaatatatccttttcctcaaagtaagcactgcacatctcttcccctccggcggtatctgtctccgctttcaggattccgtctgttacaatcccaaaggcatcgatgggatcccccagagaatagatgatgctggctgctttataggttttgtatttcagataccggctgtagatttcgtgttcccggcaaagatcggcaaaggggggctgatgcatgtttccttcctcctgatggaaaacttacccacgggcacctctcaacgcatcccctgcagacaggcgcactgcgtttgcggtacattaaaggttaacatcatcatactctatatccggggggaatgcaatctgtactcaaagtgtactgcacagatgccccaggacaaaaccggcatacccggagaagatttttccggcagagcaggccgaaaacagcgaaaatggggcaggttttgcctgtcccatataaggggtactccccagggaacgccggctttgtcttagagcatctctatggcagaggccccaaggggccctgccgccaggcaagagccccggaaattcaaaactgctgcagccctctgtccaaaatatcacagagatcgtcgtagtctttctccccctggaatctgaggacttcttttcctctgcagaataccgccaccacaggaataccgcctatatgcagggcttctgccaatgccttatcggcatctacatccacaaagcagaccttgaaccgcccctggaattcttcctgcaaagcctcttccagcaccggatgaagtgccttgcagtggacacagcgctccgccccaaaaagcacaaggacagggatttcttcctccttcagcacttccccttcccattcctgcatcgtgatcggccggaagaagtcggtgtctacggtaaacaccttctcccgttttgtcatatcttcttcatcgtctgtagcaacgcacagggcaacatcgtcatagtagggcagagtcccttccacgtcaaccactgttttggcccccagggctcccgcacccgggacacggaaggcagtgttgtctacagggactatggggatctccgcaggccttggctcctggggcacatagtcgtagggataccggtatgccctgtaaatcatgttgtttttcgggcccttttcattgtgggaatagtaaggggaaatccattcccatacaatctcatattccggcgtcacctcgaacacccttccgtccgatccctccgtgaccagtgtatttccgtttggcaggcgctgggcgctgctcacataaggactgtagaatttgctggcatctgtgggaatagcgtgccccagttccttaggcgttaacttccataccacctccagcgtgaccggattcagctccagcacacggctgtagtccctgagcgcatttttggttccgatcctggagccgggattgggcgtaccgtatccggcccagcctccgttgtcaaagacgagaagattaccctcccctggcagtcctttgggaatcatatgaaaatgatgctgaccgatgatccaccccagcttcaagagttcaggggcggccgtgaagtccggtcctatcttccagacaatgtttcctgtttccttatcaaggattgccagaatattagcctctctgcagtcaaaaataatattctccggcttgaatctctgatcccccgaatcataccagcggtttggccccagatagctcatacagttaatgtggaggtaatcacccacgcctccgtcggaggttctgagattggggtcccgaaacagcacatttctggctgcctcgtcaaaccccagctcctcaaaatgttcgctgacagaccatttccagagtatattcccctcccagtccacttctatcattgcatcgtccagaagttttttgtcggagatccccggattcctgatggtctgatgtaccagaatcagggtatttccatccaaaggctttgcgtccattcccggcacataatagcctaccgggttcccttccctctggtagtcatggtgctgccttgccatccagcggtgatcccgtcccgggtcatcaatctcctcaaaatgatcaaaactccagacaatattaccgtcgtaatctatctcaataagatttaccccatcctgcatgccataatcggggtggcggtatccggaaagtcccattacgtatccccccggaaggagtttaggcggcatggcatgcatcttccatctcctgatctcatttccgttcatgtcaaacagcaagactccgtcgttaattagcggaactatcgtatatccattccagcacttttccggctggtatacagttaccccgtggggaaaaacaagcggctgtcccataattcatatcctccattcttcctgcctgcttctcaggctatatccaccttttattaagacagctgaaagctctctgtctttatcagctgtccattctcataatatgctgccgccacagtctctttcaggccaagctcctgataaagcagactctgccgtgtaatatcctggcggtaaaccttctggctttcccccagcattctctccagctttgtcaccttttcaatctcctcgctgtggtagggattatagaatacaaagactgtctttcctgaatccggacttaatatcccccgaatctgctctaattcactggtatatcggccggaagcctctgctgccacagccccgtccgcggcagaggtcacaatctgcctcaaaaatttacgggtacaatccccaactgcatagagccccggtatacaggtctccatcttatctgtcacaggaatgtacccggaggaatcgcagtgtaccagctcctttacaaagtctgtctgaggcaccatgcccacaaaggaaaaaagtccttctgtctttacctccctcatttctcctgtcacaacgttcttcagcatcagggattccacccagtccctgccccggatttcagccagcgttgcattccatacaaaatcaatttgggggttctcataagccttttgggctgctaactcattgcagtccagatgtcctttctcgtggagaacaatcaccgtaacctttttaaccagacgtgtgagataatccgcctcctcaatggcctgatccccggctcccagcacataaatttctttgtccttaaaaaattccccgtcacaggtggcacagtaggcaaccccatggccggcaaactcttcctccccgggaatccccagaacccggggcctggttcccagatccagaataacgcatgctgcctgaaaatcccctcttcttctggtatggacggtgaagatatccccctctttttccacccctgtaactgtggtccgcttcatagaaaccgtgggaaagctttccgcgtgctcacggaatctctgcatcagcccttccccgctctcgcggactgttccgggataatttctaatctttgccgttgtgtttaccctgcctccgtagctgcccttctcaatcagcagtgtctttctgccggcccggccggcatatatggcagcggtcagacctcccgggcccccgcctataatgattacatcatactgttcattcatacttaccgcctcactcttcttgatttctattctcattgtaatcccttcagaaaaaatcacctgttggcgctccaacagcagcctaatattttataagttttctgcgctgacctctcagctgtagatctgttaggataagaatcatgtacagaaaggaggctttgctttggcaaatacaaatctgcagcttataaagtatatgaaagaaatgcaggagaaacacaaaaggcataactgccatccctgaggagggcagttatgccttatccaaacagctccaccgcttccttcatcttcccgatgatatttaacggaacagggcgcgcagtggccgccaaatgcactcctgggagcattggctaaaatcgtactgtagtctctttctttttcccatctaaaattgtaagcttctctttcttcctgaattgaatcattttgcgaatcaacgcttccggcagtttcgtatcataaggaaactgcactgtgttcttcttgtttgtcttatagacagccagatcctccctgaattcttccagtgtacccgggcttgtatagaatcccaggtgcttcttattcgctgcaatctgcagcagatacccgttcagataataagccggggcgccccaggctatcttctcagtacattccggtatcgtgtccaggattatgcgccgcatctccagaagatacgcctgcaccggcggttcaaagccttctatatattcctttatatctgcctgcatggttcctcctttgtctctatgcgtatctgcttctgtctctagaatacaagaataccatggaaaaatctactgcttttcatccagaaacgcagctttgaatttacaaaataaaaaagccaaggcatctataaactttcatttatgccccagctttctttaattcctataccgcgctgtccccggtgtgcatgcatacctcgaccttgtggtttgtacccacagccagcgctcccagtaaagattttccgtctactactatatgaccatactttaaatcaacatcaaaatcatatttctgaacagattccacaaactgaacaatctcttctggagaatgaaaaataatcgtttctgtcttcaaattttcacctcttcaattattgctttcttattattctatccagattttcctgagttgaaactcaaaattttaaaagtatggcggataaccctatcatttcctgcctgcttagtctttaatccagacacataggaaaaaccgccccggagtttcatactccgtagcggttcctcacttttgataggtattgaatcaagtttgattgctgctgttatcttgtctttgtccaggcgccggaactgttcacatagtagtttcctatccatgtactggtggccatggccccgctgcttctcaggtaataccaggtatttcctacttttacccagcctgtagccatcgctccgctgctcttcagataataccaggcgcttcctacttttgcccagccggtcaccatcgctccgttgttcttcagatagtaccaggtgtttccatccagtacccagcccgacgccatggctccactgctcttcagatagtaccaggtatttccatcctgcagccagcccgttgccatgactccgttacttttcagataataccaggtacttcccacttttgtccagcctgtggccatggctccgctgtttttcaggtaataccaggcagttccatcctgcagccagcccgttgccatggctccgctgtttttcaggtagtaccaggtacttcccagctgcagccagcccgtctgcatcacaccgttttcgtcacagtagtaccaggtcttgccatccagcacccagccctcggcacggtaaccgtatttatcaaagtaataccagtctccgtctatcagcttccaggtgttctttggccaggtaccgtctccgttgttataccaccagccgttgcggtcttgctcccagtggggggatttcgctgcttcctccaccgtaactgtgaactctgcggcggcttccccataggttacggtaatggtcttttctcccggagtggatgaatccaattcactcacggtgtaattcgttacctcttcctggcttccgtctgcataataagcggttacaatcattccttctgtgtccagtgtttcccctgcctgataggtaagtttatccggagccttcacttcaatctttgtcacttccggttttggagcttctgctaccactgccatgaattctgcagccatctctccgtaggtaaccgtcacatagtggatgcccggtacggttgtatctaattctgtgatctggtaatcctctggagtgagctccgtatagctgccgtctgagtagtgggcatatacggccaatccagtgagatccagggcttccccaaccacatattctgtctttaccggaggggtcagcactaccttagataacactggttccggtgtttcttcttttacatttaccgtgaattctgccttcatctcctgataggttacggtgattgtctgttcccctgcctctgcggaatcaaagccttccaccgtatactcttcagaagaaacctcttcttttaccttgttgctgtagacagcgtttactaccataccggcgggatcaaagtcttctcctaccaggtaatctgttttgtcaggtacaatcacttcaattcctgtgagcactctctcctttaccaggatcgtgaattctgccgtcttttcttgataggttacggtaaccttctgttcccctgccttgcaggtgtccacttcagaaacggtgtaatctttcacttcggcttctgtattgtcggaatactgggccataactttcaggccagtgctgtcgaagggttccccgatctcgtattctgttttctccggaggtgtcacagtaattcctgtaagagtcttatccggttcttccttttcctttacggttacagtaaattctgcagtctttgtcgcctcaccctctgtgtagctgacggttatagtcttctgacccggagtttcggagtcaaagccttccagggtgtagctgcctgcttccagttcctgctggctgccgtcactgtactttgcagtaactgccagtccctccagctccagttcttccccgatttcgtattcggcctttgcaggaggagttacttcaatcgagtccaatactacttcttccggtgcttcttctaatttgtaaatcttaatgtaattaacagtaacgcaggcgtccgggcaactcagatgaatatccagatttccgtctgttacctgtatctgtttttcaattacatttgtcttattcatgggtatcccaaccgtgggagtgtctgtagccaactccccgtttagggtaattgctgtcctccacgcattgctccacggattgccgatccccacctgtaccagataggtgccgttttccagctcatagccatagtcgatccctggccgctgacctgcatccgggaatgccacgtcctgaccccttgcatagcggaaagtggattccttgggctgattatcgccggtactgcgctcatcggcccacgtgtatttagtgaatattgccttggaccctgcaggtgtgcctgtggtgtctaggtctgaatcctttaccttcagtccccacatcctgccggtgccgggatctgcctgatacagctgctcggttacactgttaccgtatccgaattcctcaccctcgctcaatgtggagggatcgtgatctccgcagtctgtgaaatatgccagttccatcttgggcggctctgtccatttctctatggtgatatagttcatattaatggtggcatccttagacagagcatacacatccaggaattcctccccctgtgggactgtcacctgtccgcttacctcaacagcggcgccgctgctgatattcagaggggtttcatttaatttggtctcccctgcatatacatcgggatttccggagttgttccactgattccccatgcctgcggttaccctatagtctcccggctccagctggaagcggtatttgacatagcggggattgattccgttttccacctgattatgcgcatagcggaaggatgtttctttgtcctgcaggtctgctttattattttcattagcccactggtaagtagtgtaagcgcctttgcttccggagggcgctgcaatagcctgatcctgttctgaggttaccacaccccactgatatcccgtacggatgtcctctccaaaaatctgatccgtaacttgattgcgttttccaaatttttctccggggctgagtgtatccggattgtgatctccgcagtctacaaagtattccagttcctgtgaaatcaggctttcatccctctgatatactctttccagtgagaagttatccaagtataaggttcctttagtaagccccgcagcatctgctttaattaagacatcgcccttatcctgcaaattgataaccattgtctgttcttcatattcttccgaaagattcattgcctgggtggtctctcctgcacataacagagcttctccctctgtattctctccctttgcataaacatgaaggatatattttcctgcctccagcccctgaagggtctgggaaatactgcccccctcaacgcgggcatagtagccttcgtagctgtttgcaatttcttttgccacggataccgcatcctcgctgctcgcttcccagccataggtattccctgtaccaaagcctgcattagtgatgtacacatcccggtgttcgccgctggcttcttcaaagtatacttttacctgtacatctgcctgtacatccgggatctccagggtataggcaccgtctccctgttcctgtacctgatcttttttagatacgccatccaccagcacatctgccagtcccttttccggagccatcgttaccaggaagctgcctccctgctccactgcatttttgtcaacggtagcataaccagccgcagtagtggttacctgaatgctgtaagtatcaggtactgcaatcggtgtatccagagtcaatggcgtcagaataaaccggtcaaagttaggcgcatagttgtctaatacattttctcccggtgtggactgacttcctccccattttacggtccagctgtcatcgttgaaaatcttaattacattatctcctgcgtcaagacgaacctgaatggatttctctttaaaggtatcgtctgagaaggtattgataaagaagtatctctggggatcctgtccatttacctggaaggatgcatatttgtcaatgatcttggtattgtaagagtgtgtaccgcagatatcattgttggactggaacacctggagttcatagacacctgcctggggcgcattgtagcggatttccagatatttgttgatatcctccgccgcattggcatcgccttccataccggccacatatttgccgccggaagccatgctgctgtctctcacttcaatggaagagccacccggaatgcagtcctctgcttcaattgccgttgggtattctccctgatctactgcctgtaccttcatatagtccagtgccatatccgcacctgcatctgcgtcaatgacattgatgcccttctgcagataaacggaagccgttgcttctctccactgtccctgggcagcttccgccgaaacggtcttactcagtctgtccagcgtagtcgccgtattgcctgtatatatatggatattgccggctgccgctgactgatagcggaaggtcatgttgtacagtccgctttcctctacgactacgttccaccggatacctccgccttctcctactgttctcttatccagtccggttacatatccattgctggagtacccggaaatgctgttctcagttttcactgttgtgtccgtatttcccaggagaatattgaaatctgactgttcggcctcatagagatcccttgacttttccagagccacatccttggctcccgcccaggttacagtcagtgcatcatgccaaaccgtgccatctcccattgtctgaatctggatggtgtgggtgcctgctgacagatccccgtataaagtatgaatacctgtcatattttccagaagtgtattcttcatcatttcctctgacggttcctgtccatcaatggaaaatctctgcataatgttctgggggttgtgggtactcatattatttctggtagatcccgttccgtttccgtagataaaatccagtttatattttccgtctacagggacctctatggtgtaagtcataactgcatcctgaggcatggaaacaatggaaccgtcagagagatagtagttggggttgaacgtctcccctttggtgatgcacccggttcccagttcggcctgttcggcctcgtacaccttctgataacggtttaccattgcatctgtcagttcttctccttcagacacctttgttatcgtaacattataggccgtggaaaacttcatgttattcagagataaggccacactgccgtcctcattcacaggaagagccccttccatgataaccggtgtctggttctgtgccccgtgatatccggaaaaagcggtagcctgtactttaacatgtaccatgccctgtcccttgaatgcctctgtgtttcccacgttcagcagatttacgttggcagatccatcgattcctcccagaagcgtggtagcgctctgttttgtgttgtcaatggaagctacaccatataactgttcgtagctggtattggtagatacctttactgtctctccggacatatccccgtaccatttatacagccaccatgctccgttcccctcattggcatccgctgtcaggtcattcaggttattggcctgatgccagaaaggaaggcatccgtatactttttcgtcctccagacgggcaatccagtttaccaggcgccccggtacaccgcagtcagagaagtcggcatactcgttgatgcagatctgcggaatctccggatcctgatccgtatggttcgcttccttccattttgtccagttagtagaattccagatagacttaaagtcctgcatctcctctttcagtctgttcagtttatccacctggagatcatgccaggttatgatatcgggcatacagttattatccgcacagtactgaatatgtccccgcatattggttccgctgaactgggtattataggctgcgctgttggggccggcaatggttgcactcggatcccctgccttgattgcctcatagtaggctttccaggctgtattcgtatcagtgccctggataggggtaccctcgttaatggggatatagacaattgctttgtcaatatccacatccttcagattgtcatccttatggtcctctttccaggcttccttccactctaccaccgcaggggcaatgatggtctccaggacatttgcatattctttgtaattggcagttacaccaaacactccgtaataattgctgttgtacatcatgacctgctctcccccggattccaggaaggtcttggccacgtcaagggcatctccgtaggggtgttctgttcccagcgcaccctttgtacacaatacctttggcttcaggggcaccagtgtattcgtggtaggcacatcctcgctgctgaccccgtacaggaatccggcagcaccgtgaagaatatccccggttgtgtccccaaaatccacggtcagggcaggcatctcggctgcctgcgcctcaacgcttcccagccccgtggaaaaagcacctccggctgccattgctgtgcttaacagtccggcaacagcctttttccagaaacttttggttttcctcatcttcttttctcctccttttctcttcattagctatctatgggtaacggctgacagtcatccttcagaaataccggaatggtatcccttccgcaaactgcttcaacccgctgaccgcctttatatcttcttcctgtagcatactccgtccagactggtccggcagggagataaacacttctgacagtaattcctgggtaaagcaccggagcaaccagaatatcactgccgtagcagtattcatcctcaatcttccagcactcctcatcctccggaaattcatagaacagtgtccgcatcaccggagtccctttttcatgggcttccgccatcagttcccgggtgtagggacggagagcttcacgaatctccatatatttcttacagatctcatagacctcctccccatagctccaaacctcattggctgccccggaacaacaggttgcccctcccgtggtgcccacctggggctgtctgggttcccgatcaccgtggagacgcatcaccggacagaaagcgccccactgaaaccagcggacgaacagctcccggaatgcttcatcgttgggattccctccgtgaaatcccccgatatcagtcgtccaccaggggatccccgcaagtcccatgttcaggccggcagccagctggtttctcatgctggagaaactggaagcaatatctccggaccagacaagggctccgtacttctggcttcctgcccaggcacaccggagcagattgacaatattcttctgtccctctgcctccattccctcatagaacgcccgggcataatccaccggatagatattgccaatctggagatttggccccagatagtaccggtagttgtcaaaatcataggcggtatactccggctccgcctcatccagccagaagatcttgattcctttttcatagtagttctttctggctttttcccagatgtattccctggctccagggttggtggcgtcaaaatgaatggtagccccctcaaagtccagccccacccggaagccccggtctgtgcggatgagatagcctttctccagcatctcctgatagttctcactttctctgtccaccgtaggccagacagataccataagctctattcccatatcttttagttcccgcaccatcccatcgggatccggccagtacacgggatcgaacttccaatctccctgtttgggccagtggaagaaatctataacaatcacatctatgggcaggtttcttctcttatactccctggccacagaaagcagttcctcctgggtctgatagcgcagcttacactgccaaaagcctaagccatattccggcatcatgggcacggtacccgtcacacgggcgtactgttcctcaatctcagccggagtatcccccgctgtcacccagtaatccatctgcttggtggaataggcctcaaagctggtaatgttcttgcctaacacagcccgtcccactccgggattattccagaggaacccataccctctggaagacagggcaaaaggaacactggcctgtgaattccggtgggccagctccaggtccgctcccttaaggtcaaggtagggctgctgatactggcccatcccataaatcctttcttcagggtctagggactcaaacctcagagtcagatggtaatcgccccccgggataggctgaaactccctggcctccacttcaatggcgctgcatttgctgtctgttacatcctttcggttcctcatatactcctctaacagaagctttccggcccggttatagatgagaagctttccggcccatgttacgactgctcggattcctccgtttttcagttccgcctcccggctttcgattcttatctctgtctcctgctccggctgtgggaggagggcccagtcagtgtcctccattgcccggtttttggtggcccggatgcgcagactgttctctccccagggttctatccacatcgtttccccgtcataggtataaatcagccttccattttcctgtcgaaacattttgttctcctttccgctgtaccggcatgccgactgcgtcagccttttactgctccgctggtcatgccgcttatgatgtatttctgcataaagataaagatcaatgccactgggataattgtgactaccgcaaaggcggtgaggtagctccacttggttccgtactgtcccataaagttaaagattcctgctgtgataggccgtttctgctggtcgatgataaaagtcatgccgtaagccagatccccccaggcatacaggaaggaaaagatagagcataccataacccccggctttgcgatgggaatcagtacccggataaatgcggtaaaccggttgcatccgtctatataggcggcctcctccagttccttagggatcgaggcaaaataattttttaaaatcagaactgaaaatggaattcctatagtagcgtctgccaggatggctgccacaggtgtgttatacgcgtgtatgttcttgaacataataaacattggtgtcagaagcacagacaccggaagcatctgggttaccagaaatcccaaaagcactacctttttcccccggaaccggtattttgcaattccgtaggaagcgggaactgccaggattactgagattaccatggcccctgccgcaattaggagactgtttccaaaagaacggaacatgttaaaatctccggtttctacctgtgccgcatacgactttgtattcagcacgtggggaaacaaggtggggggaacctggaaaatctcctgctccgtcttcagggatgtcactataatccagaacagcgggaacagcagtacacacagtacaagaagcgatgcgatacacaggatcacattctttccgccggttattcttttctcgtctcccattattcttcctctcctttcgttgtcatccgcaggtagaacatactgataatcagcagaatgacaaacaatacatttgccactgcggagcccttgctgtatttgaacatttcaaaggataatttataagaataggtggagagcatatgggtggaattcaccggtccccctcccgtcattacatataccagatcgaagaccttaaacgtatagataaagcctaaaatcaaaacggattcaatggtgggcttcagcagcggtaacgtaatcttaaaaaaggactggattctgccggctccgtctatggatgcgctctcatacaattcctggggaatggtggtgagtcctgtggaaatcagaatcatattgaagggaattccgatccacacattggcgcatacaatggcaaacattgccgtattcgtggaggtcagccaatctatgttttccttgataatccccagtccctggaggatattattgagaatccccacatctgtgccaaagataaatttaaagataagtgctgtcaccgtgataggaatcatccagggcatcatcagaagtccccgcaccgtctttgaaatcttaaaattctggttgaagaagatcgccagggcgaatccgatgagaaactggaacagtaaacagcatacggtaaataaaagtgtgtttcccaaagattttataaatacaggatcgtgaaagatctctatgtaattggccaggcccgcaaatggcttgtgagctgcggtcagtgttttcatgtttacgtcctgaaagcttaatattatgttgtctacaataggatatcctacgaatataagcatgtatagaaatgccggaagaacgaacagatatccgatattgtcatactgaaaaaaccgcttcacttttttcaaaataacgcctcctcattaattttgggcaaagatatggagtacacagatcttccgcatactccgtatctctatgtatccgcttttatttttttacaatactgtcaatggttgcctgggcatcggctgctgccttgtccggttcagctgctcctgtcattacctgattaaaggccagtgagatggcatcggatacttccggccattctgccagaggacctcttgctttggcatagtttaattcttctgtaaacttttgcataactgcatcatctgtaaactgtgtctctgcaatggttttatctgctgatatgtagccaaatttgtccatcagataagtcacctgttcctgttctgtggcatattccaggaacttaagggcaccctcttcattgccgccggcaattactgcatagttttcaccgcctaaggcagaggcatattcgctgtccttgggaattaaggttacatcccagttcaggtccggtgcctcttctttcatagttggaatctgccatggaccattgatcatcatagccacattgccggagataaactggttcatcacatctccctgtgtccagttgatgcactccttgctcatagagccggaatcaatgagatcctttgctaaagtcagggctttcttgcctccctctgagtcgatggtgtaggaatccgtgccggtggaccatacccacggcataaagttaaaggtcccctcctcgttttgaacgctgcagaatgccaaccctgttaccttgtcctttgtgagagccgctgcagtatctttcagttcatcccaggttgtgggcggagttaggccggccgcatccatcatatccttgttatagtaaagtcccagacagtttactccgaaagggaccccgtagagactgccgtctatggtacaggaatctaccgcgccctgataatagctggatacatcaaacttccctgtcagatctgcgaagattcccatggaagcataggatgcatggtccggggagtccaaaatggcaatatcgggaagctcattggcagatgccccgatggaaagctgtttcttaaagtctgcaaacggaacgtacttggcagttacctgtatggcatcctgggatgcgttataatcctgaattaccttatccagggccttctggtgtccctctgtctcccaataataccagatggtcacgtcctctttttctcctgcctcctcgccgtcggactttgccgctgtctccgtactgctttcctttgtgtcctcattactgtcattgcttttgctgtcgccgcacccggcaagcatgcccatggccattgtcgctgctaaaaaagctgctactactttctttctcatgaataaatcctccttatatttgtttatcaaagaatgtcattgctggaatggctttctgttttctatggtcttattctatctcagatttcccggttccaaaactctaaataactgaaaaagggtagacatttctaaagtaatcggaaatgtctacccttttttattgatgccgctttctgtactctgccggaagttctcctgtcacctccttgaatactctgctgaagtatttgggatccgaataccccacggcggaggcaatctcatagagcttcatccgggatcctataagcagctcttttgccttttttacccggtacttcttcatatacgaggaaaaattacttcctgtctccctgtggaactgcatgcccaggtattccggcgtgatcttcagctgcccggcgatctcatccagcgtgatgccctgccggtagaattcgtggataaggcttttcgtcctctgaatcagataattgtcgtctctctccccttccacagggattctggccgtcaccccggcaagaatctcctccagttcgtcataggtgactgcagacataatatcctccagaagctcctgctgtccaacggctttcagaggttcaatatcaatttcctttcccacattcaggatactccacagaaagcgtacgtaggattccttaatctccctgggagcatagacagttccattggcaaagtactcccggaaggccctccccacctgctgaatccttttttgcctgccggcacagagttccctccgcatctccttctccagctccacagggtaggatagcggctgggtctgcacctgcgtaatcttgggatagacaataagaaccgagcttcccagaaccagcgcccagtccatatacttctgcagggtctgaaacgcgcctgagaggcggcttagtccctgaaaagcataccaccccgcgctcactgctctctggcctatccctctgtggtgtaccagatagttgctaatttcacgttctgcctttgccagatccccccaccggtatagcagaaccaggatctctgacttttcaggaaggtggaacagacagtggggcaccccgcccattcccttcagcatagtctctatctcaatagccgtatgtttcctttctctctcatattgctttcccagataaaaactaagcagcgcaaactctcctcccggatctatcccatactgtccggaaagataggtttctaattctctgtccgctgccaccgtccccatgagaagcccaatacaaatgttctccagagaccgcagcttctccggatgttccccttcgtttctcctggcctcctttagctgatcctccacattttttagggattgagccagctctcccaccgcaacaggcttcaatatgtattcacttactcccaggtgaatggcctgctgtgcataggcgaattctgaataggcgctgagcacaatcgcctttatcagaagaccgtccttatgaagctcctccagcatctgcagcccgtccatctccggcatcttaatatctgtaatcaccagatccggcctggccgcttttaccagttcaagtccggcccagccattttctgcctcccccacgatctcgtaggatgggtctatctttcccagaagctttgatattccctccctgattctgatctcatcctctacaatgacaatcctcattttcccacactccagtctttttctctcccgtccctattccattcttggtatccacagcgtaatctctgtcccttctcccggacagctcttaatctctgcctgcgcctccttctcataatacatctttaagcggccaatggcattgctgaccccgatatgggttctctcctgatcctctgccgtctcacctgcggctaagcggtctgccttctcctgcggcatcccttttccattgtcctgtatccggatccggatgcggtcctcatccccgtcaatggagattttcagaatatgcgtccggttcactccttcaaatccatggagaatggcattctccacaaagggctggaacagcagtttatggatccggcatcccagtatcccgggctctgcgtttatctgacactcaaaggtatttttaagccttgtctgctgcagaaatatatactgacggagccactccacctctctgcgtatctccaccatggagttgctcttatctaatccgtacctgagtatctgtgccagagaattaatggtattgctgatctcgtattcatccttatcgattgccatccagttaatggtatccagaatattatatagaaaatgaggattaatctgagcctccaaagcagcaatttctgcatttttctgacgcacaaccgcttcccgctccttatccatagactcttccaccttactgagcatatggttaaactgcctggcgatcagctcaatttctgtgggcatacgcttctcatccggaatcctctgggccagtccgccctcctccacattcttcatagtagcgactactctatatatggagcctgtgagatgggcaaccgtaaaatgtatgataataaccagcgctgccccggagagaataacaatcaggcatataatggttctctgctgccgcagctgactcaatgtggccgcctgattagatgcattgacaaaggtaaaatccagcttttcatcataataagcctgaacagccaggtgctcccccgacatatagccctctgcctcaaggaactgctttgcctttcttactttttcatcctgtgtatcctttttcccccagagttttgtaccgcagcgggccggatcatcaaaggaacagatcctaccctccccgtccgcgataaagttcatggtttgataccgtccatcctccatgcgtacggtatcttcattgcagatatcattcagcattctctcatcaatgctgacgattacaactccatttctcttctttacctttttataatcaataatcctgtttgccatatgaaataaataatagtcattgtttccctgggtagtcgcgtactgtgtggagtacatcacagtgcccgctgtccctgatatctgctgaaatatttctctctgggacagtctgaacccgtccagccaggaattctttgtggtggcagccgtaatcatatcatagaagaccgcctctccgctggctgtcagtatggtgatggactggatatccggctttgcactggcatatcctcttaaagcccggcgcagctggttcttactcaccgccagatcctggccggagttgatcttgtctgtcagggccacaatgttttcatccgtaaaaatctgatagagcagagcatgataggcttcaatggatacagccgctgttttgctggtctgtgtcagatttgcataggtaaaagtcttcacattatcgtttacaatgccggaggtgttcttataggtccatatccctatgccaatgagaggaatgatagacacaatgataaaagacaggacaatctgtgtcttaaatccccggacagcctttcggattcttttcataggttttcccctttagagttatttcacagtttttttatattttgtatcatgtcacattcttcctctgtctgcaatatattattggaaatttatgtttctgattgccgctttactatcattctacctgtattgtcaaaagttaaaagtctaaatttccaaaaaaggggagacattcctaagattccggtggtaaaccaaaaaactgccgcccgccggatgtttgtcctatccggcgggcggcagccctatattttatatcaattatttaattcggtatcttacgatcagagaatccagcatcttcataaaccgttcatggccttcctccgccatccccggctgtctgtagacatctttgtattccatcaataccccatggaacagacagcactccaaatcgctcagaagcatggcatcatcaaaggtaaagtatccggtcgaagctgctctccgaagcattatccggtttctgccctgcaggtcgtcattaaagaacacacttgcagaaaggccgtcggaatgaatccattcatccggaaacaactggtagtattcgaagatcgtgtccccaaggttctctttgtacttgccccagaagagggtctcaaaaacatgaatattctgaaatgcatatttagaaaaagactcccacatcagtactcccatgtccagggcgttcatattggagttgaatatcttctgcagatctaccatatagtcctccaggaactttatggaggcaaacagcagcagatgatccagatcattaaagtgcctgtaaataactgtactggtacagttagcttttgaagcaatggtgcgtatcttagtatcctcgggacctacgtccttcagaatctcatatgttttttgtattagttctttctttttgttctctgccatagcggctctccctaaacttacttagaatattatgacaactgcgccccaaacgggcgcagccatcatcaagctatctaattttataccaaaaaattaataaaagcaagttctttcagggaatgttcctactctctatagcctgcgtacgttttagagtgcctcaatatattttctgagatctgcgtcaacatcagccggtaaagtaggctcgccgtaatcggcaacaatctgtttccatttggcattggcaaccttttcaatcggcgtgcagccttctctgtgccactggtcgtaagtctgccggttgctgagtcttggtctgtagaactcatctctgaagttatccagtgtatgatcgtgggtgaggaagatgccccttgggcctacttcttcaataacatcataagcgagggtttcttcgtttacagtaacaccctggttgattctcttgaggtagccaatgatctcgtcgtcaacaatgagtttttcgaaagatgtagtactgtaggtatcaataattccggctgcatggaggataaagtttccgcctgccatctgagccatcatcaaggttatggctgactcataggccgcctgagaatccatcatcttagaatcagaaagggcaccgctgatacggcatggaatctgataatacttacacagctgtccgttaaccagagatactaccgcatcctccggcgatccgatagccagagagcccgtagccatatccgcattggaacctgaagcagaatatacaatgggtgttcccggattcacgcactgggccaatacaataccagccagaacttctgcgttctgaagcgataccagacctgcaagtgtagccggtgtcgtcattcctgccatagacagggagttaacaagctgcggctgtcctgcttctgcataggcaatgatagcgcctgccatattgttgtcgtaactcagaggcgtcagggtacaggggatggatgccattaccggtttgtctttaattgcatccatgccgccgaacagcatagaggccatctcaatacactgttttgacttctcatatccgtatacgctgcccatcagcggtttatcgctgtattttaaggtattgtacaccatcacctgagcgcggatctttacatcaacatcattgggttcacaggagatatggctctgaatatcaatattatccaatttatcacagatttttactatgttaataaaatcatccagggtaccgctgcggcgtcctttgtccatatccgtaacaaacggtgatccgtaaggtcccacatacgcagtcttttcgcatgtaatttcaacattctttttagggtttctagcatacattgtaaatgaagaaggtacgttcttcagctctctctccaccatctctctggggaaacgaatcagatcgccgtcaaccttcgcacctgcttttttcaggatttcttttgcaggttcataggtaaaaatgatacctacattttccattattctgagagagttctcatgaatctgttcgatttcattctgtgttaataattgatatctctgcatttacaaatacctccgttttcattaaataggggattccatttgcttcattccaaatcctgctatgatgcaatgccggctcttatatccggtttttcttaaccacctccacacacgatacgggccctcggtgtgcccccctgccgcatgcaccggtacccttatatcactatgcgtaaaacaatatttacataccatttgataacaacatcatatcccattatgttatcattgtcaacatatttttactgatatatttcttgttttttattaattgtatgtttaattaaaccacttccatctatttattaggtttttatttcacatgttcattgacacagcatcccatttatgttaccatcttgttatcatgataactatataattatgttgcagcaccggcaggcttaattctgctaacgcattctgcctttaccacaatcaggctgccggcagcaaaaccgttatcattcaggcaccgaactattatagaaagaatggggggggatacaaagacagccaaaaactaggaacctaacgtgcaaggtatgtttgtaccgtcaacctggcggtggaatggagacaattttatgaaaaaaatgggttttaaaaaattaatgatttttattattttaagtgccactgttgccctcgcctaccagattccatatcttcggtacacattttatgatcagatgactgcagccctgcatctgaacgatacacagatgggactgatggcaacggcagtatcccttaccagtaccctctgctatcccatcggaggcatatttgcagaaaaattttcctgccggaacctgattataatttcattggcaggactggctgcatgtacagttgtctattctatgacaactaacttcgtacttttgatgatcgtccatattctgtttggattctttgggattgccactttgtggtctgcctatctggcaggtatccgctctcttggagatgaggagaaccaaagtactatcttcggcagcagcgaagctacccgcggtattctccaggcaatctgcggttttattttcctgggaattatgggtgccgccgcctctgttgccacaggtttccgctttatactcttagcaggaactgctatctgtgtaatatttctggttctggcatttgtcttcctgccgaaaggcaatctgaacggcgacgaagaaacccaggacagcggaaaatcttattctatgctggatgccctcaagtgtaaaggggtatggatcaccatcggcctggttgcctgtgcatatatttcctggacactgggcaacggctatctgaccacttataccgtgcgggtactcggcgtttcagagtcaacagcctctaccctcggcattgtcagaagttatattattgtattcctggcaggatttatcggcggctggctgctggataagtttaccttcaaaggaaagggattctttgtattattcacagcagtcattgcagctacggcagcaatgatactcaccaacaaggtggtgccggtgtgtattgccattacactcattcttgcatttatcgccaatataatgaagtccacctactggagcactatggggcaggcaggcatacccataaagatgacagcagttgccactggagttgtatcctttatagcctttattcctgattttgttattcctcccattgccggcgcatggctggaccaggcaaccaaagcagggaatgtggaagcaggctttaataaaatctttattctgctcttcgctttctcagcagccggacttatcgtgtcagttatcttaacaagacagacaaaatcactgaaaaagcaggcataagatttcgccagacatactgctatgcaaacagcaaaaggtgcagaactaacctacgggttatgtctgcaccttttttattgccccccgccagcctctgcccttcacttttgttaatatctttattgcatttttatttcttttgccgacaaaaaaacatgctaatatgacaaaatatttctaattttttatatgtttttgtttttctgtttcattactctaacgtttttagcaaacagcttgacaatcaaatcattttatacgattatattgccaacatatggaaaagcgcttttttaaatattacatttacaagtgaggacaccataatgaaggagagaaaagaacggctgcgggaaagggaacaggagaaacgaagggaggagcgggaagatcaggtaaggcgccagaagctatatgtgctggcaggcatattgctggtactaagtatctctgctgcggcattcctgataaaaggctgcggagacagaaaggcaaaaaaccccggacacaccgcacagcaggcgtcatcccagagcagctcattggatgagaccctgacccttctcgcggcaggagataatttatttcacggccccttaatagaaacaggaaaacaaaagtccggcggctggaattatgacagcatctatgcccatgtaaaggacaaaattcaggcagcagatctggctgttgtcaaccaggaaactgtttttgtaaaagaccgctccgaactatcgggatatccgcttttcgggaccccaacagaggtgggggacgcgctggtcaatgcaggattcgatgtcatccaacaggccagcaaccatacctatgataaaaaagagcaaggggttttggatacgctggatttctggagggataaccatccgggtattgctgttctcggcatccacagcagtaaaaaagatcaggaaaagattactgtggtggagaaaaaaggtattaaaatagctatgctcaactatacctacggggtaaacgataataatctcccctcttccaaatcttatcttattgatatctgggacgaaacgagagtagagaacgatattaaacaggcagagaaggagggggatattactgtctgctttctccatgcaggggaagaatactctaaaaagcctacaaaagatatggaaaaaaaagtagattttcttctgcagaacggcgttgacattaccatcggtgcccatccccatgtactgcaggggtatgaaatgaaaaagaaccggaagggccaccagatgcttgtgtattactcgctgggaaactttgtgtccacccagcagaggccggaggcactccttgggggacttgcggaaattacactggtaaaatccgcagaagacgggagtgtcagtatccgggatgattacggactcacccctatagttatgcagtatgatgacgatcccagcgcacgagctgtctatctgctggaggactatacggaggaaatggcgcaaaagcaccgcatacacgtctattccaacgaggaatttactctgaagcggctgcaggagatggccggggaaattaccggtaatgtatactcctgacaacgcaaaagtgcacaggacgccggccttaggccggtcacctgtgcaccttacatcattcctgccagtatcacactggcaattatccctgcaacagtagccatcagtgcacctgtgagggtgtatcttgttttctttacctttgctgtcataaagtaaacagacatggtataaaaaatcgtctctgtgcagctcatcataatggacgctatcaagcctatctttgagtcggttccaaattccttaaacacatcaagcaccaatccggttgccgcactggaggagaacatacgaacaatggccagaggcaccagctgggacgggaaacctatatatctggtccactgccctatgagatctcccaggagatccaggaagcctgacgctcttaaaatccccacgcctaccataaggcccaccaacgtgggcagtatctgaaccactgtcttaagaccgtcctttgcccctgtgacaaaatcctcgtagacattctttttcatgagaatgccatagcccacaatataaaaaattaccagcggaataatcaagtctgagacatagagtaaaatcttcaatataacccctctgaactgtcttgtctatttattttactccgccggccgtaaaaaaagaactctcttttacgctgcacttccatttccgttgttccgtttagggtttccagccgcgcatgcatgttcaaattcttttaacttctgcctggcttccggattcagagttctgggcacctgaatctgtattgtcacatactgatccccacgcacatccggattcttcatagagacaaccccttttcccctgaggcggatcttagtcccggactgtacgccctcacgaatcctgcacaccacatttccgtcaatggtaggaaccgtaacctccccgccgaacacagcggtggtaaaaggcacttctgctgtggtatagatatccatgcctttccggcaaaaccctgccttttcacccacatgcaccttcagaagcagatcccccggttctcctttaccgagcccgggaagccctttgccccggagccgaatgcttttgccattctctatccctgcgggaatatgaacctggagtgactgcgctttgtcccccggtgtctccggattctgaagcgtgatgatcttgtcgcacccaaaggccgcttcatcaaatgtgacagataactccgcatgaagatccggacctttggaccgaaaaccttccccggaaaaccctctgccgtaaaatctgccggtgctgtcaaatccatctctatgaaatccgctgtatctttttctgtctcttcctccgaaggcatctccaaaaatatccccgaaaatatcgttcatatcgccgccctcaaaatgaaattcccggtagctgccgtcagagctgctgtatgcatttccatatccccctgtttccccgggcgttccctccagaccggcatgaccgaactgatcatagagtttctttttctccggatcgctcaaaaccgtgtaggcctcagtagcttccttaaatttttcttctgccgctttatttcctgtatttgtatcaggatgatacgttttcgcaagtttgcggtatgcttttttgattgtctgctcatcggcatctctgccaattcccaaaatttcgtaataatcccgttttctttccattactgccacctccctgctgtgcagtcaaaaatattccccgggaagattcccggggaaacacaatatattcttatatgaaatacccggtatcctcataagctgctgttcttattcaatacccgaccgccgaatataattctatagtgcagcgatactttgcgacttacgcttgttgttatatctgtaatataacagctatactttcatttgtcaagagaaacggcgaaaatttataaatcctactctgcctttcccatcccttccacaatctcacgtgttttccaggttttcaggattcccagggaaagcagcatgcttataagcagggcaaccagcgataccagaaaaaaagcagggaagttatactgaaagggatggccaaaagcacgcatgtcagagattctgtagagatacctaagtgccggctgagatatcaaaaacgccacggctatggacaccacgcacagaatcgtattttcaaacagcatcattcgttttgtcatagccacactcattccaatggcccggagcatacatacttctctggtccttgtctgcatacggtacctcaggttatttatcatattgatcatcactaaaacaaaagcaatgacggatataccatagacataaaccatctgtttctgatagaaggtttcattctgccggatttccgaaatcaggctgcgggcagacacattatcattttgactgctaaccttaatcagctgtctttccagctccatctgccgggacagtgacatttggttcccgccgtccgcatacatacactggataccgctgtctggggcaatcttttttatctgctcatcgctggtgatcagcaaagggtagaccgtccggttgcagtcgtacatataggcaaaggatactatggccgcaaccttatatgttttatactcatattctgcctgggtatctgtcagattgtcatactccaacgtgccagtatccagatccttcctgtattttatctgtatctcatcccccacacggtagtccatcaggggcgtgccttctttgtagaaacccggatttttattctccttcgtgtcatccgttcggagcacagagagaatcacctcgttctccccgatctcctccgggtcaaaatctccggaaatcacatggcttttcaatgccgtcagcgcctcgttgttgtatccgtacaggatagatttgtagatctgattcctcccgtcatatcccgcgtccccgtatccgtatgtgtctctcagccttttgttgtgttcctcgtaatagctgtcgtttcttttctttccggcttcatccacaacacgcaccgggatgccggatgctgtcttcactgctgtaatccccgggatctgttccatctcccgggcgctttctctggatatcccctcccgggcgccggcaaaagcctgcattgtcatagcatactgtccgtttaaataccacatttcctctgtatcactgcggtatgcctccagggtctgtgcccggtaagcaaggcccgtaaataaggtaactcccagacataccgtcagaaccacaaaagcgctggtcttcctgtccctgaaaatatatttgcatgccatctgaagaagggtgcctgtcttgctctcggacttctctaaggcaaaaacgcttccgcttttcttttcctccctcccggaacgccccccggatatggtttctgtcacagatgctgacgcgatctttctccctgtcatccaccccaccgttccaatcagcaaagcagtcactgccacgcagataagaatcagccacacaggaatcaccggagcaaagcttaccttttcattaaataaatagatttccataccccgatcgccggagatcgcactaatgaagactgacaccagcaatcccccggcgatccccgccggaacccctgcgcagtagataagaaagagttcggataaaatcattctctggagctgcctccgcttcattcccactgcccttaaaatgccatactgtttttctctggttatagttgcaatgcggtaaatcccatagaatactaccatacagatcacgagaattacaccgatcaccttaacatccgtccagtataaatcccggaaatcttccctcgcaggacaggttcgtatctgactgctttgtatccccagctctgtgcgcagctcttttatcctggaagtataactcaccccctccttaaactgcagatacacaaggtaagagtctttcgtttgcttatccagaggggtatacagttggatcactccatattttttattacccagcatatcggacaaaatgccaaccagtgtaaccttcttcggctccccggtttccgggtctgtgatagtaaagctctggttgaccgagggttctatccccagatttaaaagagcccatttctctgcggctacttccccttcctgtgtgggcagtctgccctctatggtctttgccatcatggtaaccagcgtatcatcccccttgacgagaaacatggtctgatggttgcgctgaaacgtatagcgccctccctgctccactgccagccgctgaatactcctgtcctctttcaactgctgaacttgctgttctgacaggtcctctatataacaatctgagggggtaaactgcgcctttgcctgtatgttagcaattctgtgattggtatgcagcaaaaccagcatggcagtcaggagtgtaaaggtcagggcaaaacttagaaagatagccagggtgtttttcttataactttttataaattgcaggtgcagtctgctgtcagtttctctgcctttcattctcccacctgccttttcacaagctttccgtcctcaatccgcaggatccgatccgcaagctgtgcaatttcctcattgtgggtaatcatcaggatagtctgcctgtacctggcgcttgttattttaagcagccccagtacatcctgacttgtttttgaatccagattccccgtaggctcgtcagccagcacaatggcgggtttggccgccagagccctggcaatggcaactctctgctgctggcccccggacagctggccgggaatgctttttcttttttcccgaagtcccagaatccccgtgatctccagtacgtactcctcgtccacccgctttccgtccagtttcagaggtaatataatattttcccatacatttaacatagggattaaattgtactgctgaaaaatgaagccaatcttcctgcgccggaagacggtaagctcatcatccgacagctcctgaagttttctgccgtcaaccaccacttctcccccggtaggaatatccaggcccccaaccatatttaaaaaggtagattttccgcttcccgaagatcctacgatcgcggcaaactctcctttttctatggtcagatcaatgccgtccagggcacgaacctgagcctccccttttccatatacctttgtcagcccttttacttccaatatattcatgttttcgttctcctccgcaaatgaaaatagtctgtatcttatatacagactataccatgccaatatctcaaacctgtttccggaatgtctcacttctgagatatttcttctttcagcagaaaaagagagaacacactgcccttaccctccctggaagcaagttttatatatccactctgggccttcatcacttccctggcaagatacagcccgatccccagtccgggctccccgctcaccccgggggatcggtaaaacctggagaaaacgctggcctgttcctcttccgggatcccaatcccctgatctgccacacggatacatacaaaaaaggaataagcctctgcagagacaacaatctcacctccgcagggcgtgtactttatggcattgtcaaccacatttgccgctgcttctatggtccatttcaaatcgaacacagcggtttcctctgtgggttccacggttagccgtacccccttctgctctgccttcggcataaactgctgctgtacggcccataacacgggctgaatcctctgtttttgcatacatactttaataatccccgtctccaggcgggacagttttaccaaagattccaccaggaattccagtgttttagcctgctcccggatcgcctccgtccagcccgccgcctccgggctcccgtccgatttctgccgtgccagccattcttccagtaattgtgcgtacagtactatatttgagatgggagttaccgattgatgggaaatatcagaaatctgcagctggatctgctctttctccctggaaagcttctggtatgccatctcattgtcacagaggtaccgccacatggtgttttctatggccgatatccccgtctcatccaaatgcttatcctggaatctgccgtctatggcatcatccagcatcttctgtatccgtcggatgactcttttctcccgcgccctaaagaatatcactacagaaatacaggcgccaaacaaaacgaatgccgcacttacagatacaagtatcagaacctctgccttcatttttgcttcctctgctttctgtactttattgttttgcccagatataccctatgccgtacacggttttgatacattccggtgcgctgggggaatcccccagcttattgcgcaggcggttgaccgcaaccgtaagggcatgttcatccacaaactcggtttccccctgccagacgctgtcaatcagccggctccggctcacattttttcccttatgctccaccagacaccggagcagccgctgttctgttttgctcaggtcgatcccgcggctgcccttcataaattccattttctcaaagtcaaagcaatactccccgcatttgaatacagcacgcgtgtcttttccttcccgcagctgcactcccaccctggcacgcaggaccatgagactgaagggttttgttatgtaatcatttgccccggattccagtcctgtcacgatatccatttccatattatttgctgtaagcaatataataggcgtcctgtcaaaacggcggatctccgccattaaatcaatcccgctgccgtccggcagattcacatccagaaggatcaagtcgggacgctgttccttccaaatctcccttgcctgctgcagggtaaaggcctgcacgcagcaatattcaccccgcaatgcaatatttatccctttattaagattttcatcatcttccacaatcagaacctgtttcatataacgcctctcacctcagcctcacttttttaacacatattactatccgtatacatataccctatcataaaagaagctattctgcaaaaccatccttttccatttatctattctctgctgttatgtttccttattccgccgtccgggaagagcccatgaaccagaaatagcgccttatgtattctttctatacataaggcgccgcaaaaattttcaagagacattctgactctaatcaacaacaagatgtaaaggatacctctcttctgcctccaggcagtatacaggatacggaagctcctctcccatcttccggcagctctccacagtgctttttatccagccctccatatcttcaccgggagagggaaaatgcaccagaaatatctgatccggccggcaaaactgaagcaggcactttctcgccccggacagccccagggcgggaaatggggcaatcagaacactcactttcctgcagtactcccgcaaatggccgtacagcctgtgatcgggctttgcatcccccgaaacaaacagttcctgcccctgatactgaagcagtacgctgtaatggcgtacgtcccagtagacgttgcccatatgttctgtggacagcagatatagagtcagtgcaccgtatctgcccataaagtcctggtcagacagtctttcctttctcagaaagcgggaggaactaacgccggcttctgccagtatggaaaggatatcatcccccgccaaaaccaaggcagagctgtgggttttcagataagcagaaaccttttggggatggaaatggtccctatggctatgggtaaccacaagaagtcctatctcaggacagccggcatcacagagaagcttttgttccagtgtctccggcagtggctgatagggcttgatctcccgaccggtaaatacatcaattccaacccactgccctccaagttttaatataactcctgcatttccaacgtgaaataaataatccattatcgacctctcttttgccttccccatccgcagttacctttttagttctctgcagatgaaagccatgacaccacttccctgatccgttccctctgctgccctgaactgccggcgcagaggatatcttcctccgtcacatcacccatatcaagccttttccctgtggccaaacgctcaaacgcctggggcagaccggtatccaggcagtcggaaaacatcttaatctcctgaatgcgaaggccggatcccttcatccacagatctgctcccccccacgcaaaacgtctggtgcatcttatcccgcactccggtgactttccgtatctccattcccaggcggcgtaccattcctttgtgcggttgatttctgataacggaaattcctgatcccttaatttttgagcgctcccatattctttgcagaagctttctattaatgtacctttcaatccctcaacggtaagctccgggaggatatctctcaggttgcatacccgggagcgcacagacgaaaccccttttgccctgagcttttgaggggatggggtcagataacgctccatgttttgcaagttcacattcaccattaaagtaccgtgatgtactctgcagccaccggtattggaaaatgcatttcccgagaatttgcatccattttccgccagcaaatcatttcttcccgaaaattcagtgcacaggccgtaggtttttatggcgtccgtcaccaccttcatctgccgttccaaatcatagacctctggatctgccaaaaatgtaaagcacagattccccagatcctggtatacggcgcctcctcctgttgttcttctggccagaaaccctccttcttcctccagcagctttgccctgcactccagaagtgcattctggttcttgccgattactactgttttgtcattctgccaaaggtagaggatcacatcatttttctgtattctggtgcccagatacgtttccacggccagattgtaccacggattacaggattctgtctgataatagtaatgtcccacacgctcactcccttctgcagccggacgggctatgagaaccccatgcctttaataaacggcatcctggagttttctcagttcatagatgtaagagttctcatccatagcaagcatgtcataggtgagcacctcacccttctttatatctttttttgccactgtattcttgttgatcagcccgatgggtactgcattcatcctcttggctgtatcgtattcttcaatcataccatacacggtgtatcccccgatgtaatccaggggctctccggccttgagatcccgttttgccagggtgatgacctcacacaccggtttccccagaggcgcaatggtagccatcttgtcgatagacgccatagccactgaaagcggcgtctcaagactgcatagatggaagggacgaaacaatgtgtaattggggccgtctcccattcttaaataccgcatttccccgtttacctcgctgttcccgtgggctataatggcaaacacgcctggtgcaacgccatttacatattccaccaccccgtagcggtccaggatcccgccctcttcttttgacaagaaggtgccggcaaggccgtctacgtctgtggatggaccatgggcgccccggatatcgcaggtcatacctgtagagttcgccatggccgtcatctccaccattgtctttgttccgtctttaaaggaacagagcatcttaggggcaagccccaggctctttgcctcctttgcaacggtatccggcgttgactccctgtttatcttatgattctgtccttttccgattacacgcacctggaagcccattgcctttgcaaaatcataatactcttttacggcgccgggctcatctcctgcggatccagtatacacgacaccctttttgtccgcaaggattttcaggtaggatccaatagtaacgtctgtctccacattcagcattacgatattttttccattctctatagcctccaccgccagccgtgcacccacctccgggacgccggtggcatctaccaccgttgaaatcccttccgcctgtgcaaccagcttaaagtcctccgtcacaacaaacttgccgttttttaatgcctcgtttgcttccttcagatcattggtaacaataaactgttctctggttaatcctgcattttcataggctgatacggcattctctaaccggatatccgaaataatcgcaggcctcatgccgggcatgcatgccatctggttgatcattccccttccctggtttcctgctcccactacgcctgcatatacgggattcccctcttcctccagcttcaataacttgtaattcagtccaaacatattactttttctcctctctctatctgattaccaccatttaatctgatccgttatgcgggtacgcagctgaataaatgcaggatccgtaaagtcccggggtctcggaagatccacttctatctcctccttaatcgtcgccggtttattggtcagaatcagcactttttctgccagatacacagcctcttctatgttgtgggtaataaatacaactgtgcttcccgtttctttccagagccggatcacctcatcctccagataataccggagttttatatccatctgcccgtagggctcgtccataagcagcaagtccggattcatgacaaatgcccggcctatgataatgcgctgctctgaactcaccgacagctgggaggggtatgcgtttctgaatttggtcagtcccagcagctccagcatattatctaccctccgcttaatttcttccgggggcagtttctttattttcaggccaaaggccagattctcttctaccgtcagccactgaaatgccgacggctcctgaaatacaaaggccagattatgttttttcggatccgccggttctccgtctatcaggagttctcctgccgtgggctctatcagctttgtcagcagattcagaaatgttgttttgccgcacccggttggccctacgacacagacaaattccccttttctaatgttaaaagaaatatcattgagcaccaggagatcatcaaatttttttgtcaggttttttacttccaccttaacttcacggttattgcccatctctaacacctctcgtccttccatagttaaagagccagatccgtattcgccgcaatcacctgcctgatatgcagaaaattggggtctacgttatttctgggccggggtaaatctatctcatatatttcttttacgtgggcagggcactcgctgaataagacgatgcggtctcccagatacgccgcttcttcaatattatttgtcacaaagataatggtacgcttttcctgttcccagattcttataagttcgtcttccatggcatacctggtctgggcgtccaacgccccaaaaggttcgtccatcagcaggatctccgggttattggtgtaggcgcgggcgattcccacccgctgcttcatacctccggagagctggctggggtaagaattctcgaatcccgacagacctaccagatcaatatatttcttcgcccgctcccgcctggtctttttgtcctccccggccattttaggacccagctccacattctgcatcactgtcttccagggcatgagtcctgttttctgaaacaccatccccacggcgccgtgggaaccccggacttctttttcatccagataaaaactgcccgacgagggagtctccagccccgctatcatattcagaagtaccgttttgccgcagtggccgggccccagaagtactaggaattccctgtcctgaacctccagggtcacctcatgtaccgcctcgaattcgccctccggggtatggtatatctttgtcagtttgtctaaccttaaccttatttttttctcagccatggacaaatcatcctttccacaaatgaaataaatactgcaagcagggcacctacaatgccgatagcgatcattgccacaaggaccagggcagtatcaccgctgtccatgcccctggtaatcagaaagcctacgcctgattttgcccccagcatctccgctgccagtacaaccatccatccggtactgatagaagtcttaattcccgccagaatggtgggcagcgccgatggcactgcaatttcaaacaaaagctgcctggaattggcgtgaaatactgttcccacatccaggtagagctgttccacgcgctccattcctgactgtgtatttacaatgaccggaacgatggaaccaattactacaattaatattttgggtgtctcgccaatcccaaaccatatagttataagagggatccacgccagagggggaatgggacgcagcatattaaagatggagccaaaaactgacttgccggtcctgctccagccgattagaatcccgaataagatacccgctgaccaggaaattaataaggcggtcataactctgcgcaggctggccaggatatgcccgaaaaagctgagtctcataatgggcttgtcaaaggtatccgcaaacctggaccaggtctctgccggtgtggggatcagatccggccgattcccggaaacgcccatccacagggccaaaaggcatgcaatggagacagccggcagaacagcatacagaatttctaaaaacagatttctttgcttcatcgtgttctacctccccatttcacaattttcttctccgcgagttccagcagcgctgtcataattgccccgatgatgccaatcacaagcatgcccagaacgataatgtccggtctggcaaaggcgcgccccataaggatcatgtaacccagtcccgcactggaggcaagcatctcggccgccaccagtgtagaccatgaattccccagggctacccggatcccggcaaaggtaatgggaagtgaggaaggaattcctacctttataaaaatagtaaagttggaggctccaaatgttttcgccacattgatgagcacaggactggtctgcttaattcccgtataggaattaatcacacagggaataaatgctgagaaaaatataataaacgcctgtgccttcagtccgattcccagccacaggatcgttaaggggatccaggatatagggggaatgggacgtatgatttcaaacagaggggtgacaaagcgatccacccacctataccaccccatgagccagcccaggggaatacccagaatcaatgcggtaaaaagccccaaaagagacacccgcaaactggaaaacacattgacctggagcgtattgccgtccggcgctgtctccgcaatttttacaaaaaacagctttataatgtctgtgggcgccgccagatactttgaattgataatgccgcttactaccagcagctgccagatgacaaaaaaaccggcaattcccagcactgacagcaaagcgtactttgtactgcccaccgcgaatttatttttctttgtttttttattcattctcatttcctctatgattatgggttaataattccatcttccggcctctgtcatttccttgtgaacctcttgggcaatgcttggatcaaacatattgttatccagcacgaattcccggtctttctctgtatactttccggtgtcaataaaaaagtccagggtaaccagcaaatcggactccgctttggtaactgcccgctttgtgtaaggcgcatactctacggtagtgtccagctgctccattacatcctccagcgtcgggctgtttcttctttcgcagatatattttgaggtttcctcgtcacatgctatcccttcaatctcacaggtttccagatagtacgcttctgcctcttccatattgtcagcaatccactcgctggctctgtaatacacttcataaaactttttaacagcatcccttttattttccagggcatctgccgttgcgcagataccgcattcgattaaatcacctgtaatatccagaccgctgacctttttatatcctgccttttctgcttccagggccacagaaagggacaggcacacaccatccccctcacctgccttaaaggcggtgaaacctgtgctgttatccatatttaccattgtgatatccttatctgtcagacccagaagggacagggtggaattcagcacaatatttgtggtggtgcccacaggcagaagccattccgttcccgcccattcttctgcagtgccgtataactcctctgccccctctaccttcccttttccggctttatagataggagagtcttcccgggtatacagattcagaaccgcgtcatattcacagttgccgatgcagtaaacatcatatcccagcatgcccaccaaaactccggggctgcctgtggtagcgatatcccagctctcgttggcctccatcatagcaggaccgctggtaaaagaggaatactccaggtcaatattcagttcatcaaaccagcccttttcatctgcaatataaattgggagagagtgcataaccccggagaagtatgcaatatccagcgtctgcctttcctccaggggctgtatatcccaggttgttttggagtccttccctgccgttgttttcgtctcctccttggaggaagacccctcaccgcatcctgccatacctcccatcgccaatgacattaccaatgtaaacgccagcacctttttcatagttttttctcctttctatgtttgcttttttcagtagtttacatatattgcacaaaattatagacacaaattagtataattatcagcatgactgcaataaaaagcttattcactatatgtgaattaattctgctgttcagccttcttcccgctgctccccctaaaattccaaatatcaccatccccagcagaagtgccggacggacagccggcagattccctttcactgctgtgaagatcacgctgctggcctgggatatgagtataatatataaggaattctgaacagccactttcgtctccatggagaagcaaaagtaaagaaggaccaaattgatggggccccctcctatccctaaaaaggaggacataatcccaagtataattcctatacatgcacagatactcttgccggtgatctgctttgtgtgaatcttatgtttctgcagtgtataacacagtgtccctatggtaaggacaaacagggccgcggactgaacagcgccgatccgacccgaatcagaaaaccagcggttcagtacttcgaagaggcattttcccagacagcctcctgcggctgcccctatccccagaaacgtgctgactttatagtcaatacgggagtctcccttcacatggacgctcactacggaatagcatgtcatggacagtacggtacaccctgataaaaagctgaccgtgcccgcgtccatgagctgaaaagaatccagcacgggttttataattactccgcctccgatgccgcagacagatccaaggacggaagccagaaaactgattagataaattatgagcagcgatgaatcatacattttgcagatcatcatctttcatacacagatggacagctcccagcttaaacgtcttgggaagtgccagtatcttcggatcttcccccacatacttctttttcgcatctgccagagcttcctcaaaggttgctcttgtcttaagtcccatgcctctggcaattcccggttcctgggctcctacaatatagattgccgaggtattttcctctgcgatatgcccgcagctcatcatgctgaatccatggaagggatggaacgcattggcaaaacggtacttccggatatactcttcctttgtggcaaagtactctccatagcggttcatgtccggcagaatattcatatagtcatgctgaaacatctcatataattcccttagatacggccacctttcatcgtggaagtagccgttgcagacagaggaacagataattacacaccggtcgctcataatacgtttatgccggattacctgggcagacaatgcctgcatcatctgaatgggattggtgcccataccgtttccgtagtggaagtcctggggcataccgaagaccagaacatcatatttctgctcggcaaagggtacataggttctgatatttgccgtcttccagctttgcctctgcatctcggcagcgtagccggaattaatctctatctgcctggaataggtgtccaataccgcgtcacagcagaaaaatggatgtcccatcttttcctccatatgcctgccaatctcgtcaaatttcgtccgcatcagggaatgtccggagaccggcgtaaagtccggacggtgcattacctggggtacatggtgggacgcaatacttttccagtgggtaatgcctgtggagcagtgcttatacccccctgaatatcccccgtagggatttccctgggtatgaccgataaggatagggatatcacactcgtatacataccggttcataataaccggatccccccgactggtagtccccagatccaccaggtgttcatagtcctccgaatcgtgactggtaatctgattggtatgatagaattcatcaaacagctctttcccaaggatctgtttcatctccggcaccgtagttctggggtgcagtccgttggaaaacagaagaagaatgtctttcttttcaacccctgcagcatatagctcttccagcattaccttaatggcaacttttctgtgggaagtggcctggcagccgcctttcacaatatcgggtattacaaaaacaaccttgctccctttatgggccagcttcccaagaggctccattccaatggggctgcgcacagactcccttgtgcgttcataaatttcagcttccggaatgtgggggggatcaggaacggtctcccctggaataaatacatctgctgtatccggcagatcggctgtcatcgtgccatgcccatactcaaactcaacgttcattcgccctctcctccctgttctcctaaatataagtgtacaatttccaggtattcctccggatagaacccaatattttctgaaaaatgggtcagggcaatcaatcccccgtcaatctcctcaatagatgccagcatctttgcgttgtctgcctttaggcctccgccgtataccacatccatgccgcccgttttttctttgatgaatcgtgcaatctccgttatgtattctttaccggccggagtcttcccggggccgatagaccatatgggttcatatccgatgacaactccctctttgtccacgcccttcaaccctgtctccagctgttctcccagcacctctttccaccgttcctgctcctttgccgattcaccgatgcagtacaaaacctttaagcccgctgcctgggcacacaaaatttcttcgttcagcagaccgtttaccgctatgggatcccatatcccggcctttttcagcaccccctttttgtcatttcgttcctcacagtgtccgattaaagtggcgccgcatcccatagccttcactactgatgcagtacggttagtagtaaatgcaccaaaattccctcctacggcggcatcctctctgtagacgccctggcttcctatcattaccgggctgtccttttccagagcctccactgcattcataagatgtgcctccggaaagaaatggataaactctacctcctcctttctgtattttttaagtccttcctgggtgttttttataatataagaagcccattccggcagctctgcaagactgttaacacccccgtattccttagtaatgtcgaatcttttcaggttcaaaaaaatatgcttcatgctctacccccttgtctttttgttgcccgtatgtatggcgcggttctgcgccgccaaagctgcctcccgcacacattcactcagcgttggatgggcatgaatggtgtcaataagctcatctgcagtagcttccagttttatggccagggctgcctcggcgatcagctccgttgcctgcgccccgtagatgtgtactcccagcagctctccgtatagctcccccgtcagtacttttaccatcccggtgtcctgccggtaaattaaagctctgccgttggctgccatgggaaatactccggcccggtaagatatgtctttttcccgcagctgctcctccgtaaatcccacacccgccagttcaggaaaagagtacactccccccggacatatacttccgtcaaagctgcgggaccctcccatacagttttcagccgcgatcatgccctgttctgacgccgcgtgggcaagcatcagctgtccgttgcagtctcccacggcatagatatgctttgcgctggttctcataaaggagtctgtcaggatccttctttcagccctgacacctgctttctccagattcagcccttccaggctggcctttcttcctatgcacaagagtatcttttccgcttccagggttatctgtgtattctcctgttccacacagcaggcggccatgtcaccttttttctcaaacttgcagacttttgctccagtcataatgcgcatgcccctgtgttccatgtctgccttcagcttttccgacaatgtcctgtccatgttaggcaaaatattccctgccatttccacaattgtaattttggtgccgaactcgtgatatgcggttgccagttcaacaccgatcacaccgccccctactatgagcatactgtcgggtaccttttccagagagagggccgccgtactgtcaatgcagatgtctcccccggctcccgggatgggcggcaccagaggctcagcacctgttgcaagaataaagaaatcactggaaaccctttgtttttggccgtctgccatgttgacgcacaccgtatggggatccagaaagcccgccgaaccgtacaatactcttattctgttggatcgcattaacccctcaacccccgagaccagtctgtcaattacactttttctccgttcctgaaccatatcccagtccagatgcggcgaggccacaacgccgattccggcggacgctcccgcctcgtggtatacatgggcgctgtccagcagcgctttggtggggatacagcctatattcaggcaggtgccccccatccgtctcttttcaatcagggttacttccgcccccagctgcgctgcccggatggcagccacatagcctcccggacctcctcctatcactgttactgttttcttatccatctcttctccctccgctaggccagcatcatcaccggatcgtccagcaaatccttgatcgctttcagcaattttgccgcagctgcgccgtcaaataccgtgtgatcgaatgacagggaaatctgcatacaggttctgacacatatttcatgttccaccactgccgctgtctctttcatacagcccaccccgagaatcaggcattccggggaattaataatggggtcaaaggactcaatcccaaacatccccacgttggaaacggaaaaggttcccccgctcatatcctccccggataaccatccgtttctggccttctctgtcaaggtcccgaattcacctgccagttcaaagattccttttttatccgcgtttttaagcaccgggacaaggagtccgtcaggggtatccacagcaacaccgatattaatatccttctttatgcagaatcctccctcctgcgtaatacaattcatgtggggatatgcccccaaagcagctgcacatgccttgacgataatttcgttgtacgacactctggtctgcttttttaacttttcccgaaaggcaattaagttttcacagtcaacggtggttaccagggtcacccgcggtttgtgatttgcgctttccagcatatgtctcgcaattgcttttctcctgggagtaaaaggcacaaagacagatgcgtcccgggaaacaggcgcctcatacctgagaacatccgctttcacaattctttttccttcctctttcggagaaagctcctctatgggaatccctaaatcttccgccatcttctttgccagaggcgagatacgcaccttccctctttttctctcctgtccggcagcctttcctcccggcttcctctcagggacgtccgccgtatcaggttccggcttaggatctgcacttgctttgttctgatctgccctctcctgcgtatactcctctccctcctccagcaggatcgcaattttctcctgacaggggacggtatctcccggctgcgccaggagcttgtacacgattcctgcatccgtggcaaagatatcctgaacagccttgtctgtctctgcccgcagcacaatctgttccttttcgaccttatccccgggttttatgagccattcgtcgatcactccctcttccatattcattccaattttaggcaaaactaagtatttcggcatagagtctccctcctcaatcattggataagcttttatgaaccgcacttataacatctgaaacatccggcaatacggcagattccagaaccgcattatagggaatcggaatattcagggcccccacccgaaggggaggggcatccagaagatcaaaggctctctcattgatctcggccacgatatcacttcccattcccccccgtttacaggcttcatggaccacaatgaccctgcctgttttttcaatggaagcaatcaccgtatcgtaatccagaggcaggagtgtccgcagatcgattacctcgcaggaaattccttcctgttccagcttttcggctgcctggagacaggtttttaccatactggaataggtcaccagggtaacatcccgtccctcccgggaaacagcagcctttcctatctccaccaggtaatcctcttcgtccgggacctctcccttcaccgcataggttcgtttgttctcaaaaaacataaccggattattgtctcttatggctgccttaagcagtcccttacaatcagcaggtgtatagggcgctacaattttcagtcccggcacatggttgaaccaggactccagggactgactgtgctgtgcagcctgccctcccccggcccctataggaacccgtatgaccagaggcatttccacgtttcccccaaacatgtaccgcatttttgccgccatattgacgatctgatccatggcaagggtaacccagtcgcaaaacataatttccacaacaggacgcatgcccgtggcagcagctcccacacccataccggtgaacccaggctcggatatgggggtgtcgattacacgctccagtccaaacctgtctgccagacccatggttacgccaaaaggatttcctttcacgccgtcatcacaccccataatgaatacactgctgtcccgctccatctcctcggcaaatgcctcgtttaaagcttctctcactgtttttatgctcataacacttctccctcttttcagataatgatctcaccgtctgcatagatatcctcgtagagtgtctccagagacggctcatggcattgggtatccgcatatgcaatggcctcttgaatttcagctgccgcccgtttttgtatatcctccagttccttcccggggactcctgcgccctccaggaattcccgggtcctcgtcaccggttctatctcgtacagtactgctattctctcaaggtccttttcgtctctgtagttctggtcatcccccacatggtggcccagcatcctcatatagcgggcctcaatcagggtggggccttcccctgcccttgctctggctgctgcgtccctgacggctttatacacttcaaatacattaaatccgtcaatctgtatccctggcatcccaaagccctctgccctcttataggcgtcgtgctcctttgtcaccctccagtagtccgtccctatggcccactggttatactcgcatagaaatactaccggcaggttccaggctgccgccatgttcagagtttccgaaaaagggccctggttgcaggctccgtccccgaaaaagctgagtgatactttcccattcttctgaagctttgccgagagagcagcccctgcagcaggggcaatgccgctgcctacaatccccgttgctcccaggattccgctttccacatcagcaatatgcatggagcctcccttccccttgttgtagccctccgcctttccgaacagttctgcgaacatccttcccggagaagctcccctggcaagagcatgcccgtgtcctctgtgggtactggtgatgtaatcccccttttccagggcatagcaggcccccacagcgattgcctccccgtaataatacgcatggcacatacccctgatcttatctgccctccataaatcccgcacctttaactcaaattcccgtatttgacagatcctgtagaacatttcttttgcctcagccagggtcaagtcctccggcagctccctcataggtgtataactggggataattgatttgatttgttctgctttttcattctccatttctgattcctccataactccttggcagactatataacaaaagctttaacttatctgtatcataccacaaattatttgcttacttctacgcaatatttttggattttatccatatttataacaaatatgcggcatcttttttgtttattttgttatatctgcctttttggccagtaatccagcaatatctctcaatattattagaatatttttccattagttatattgcacattccaatttttttgtgtatactttgagttaatagaatagattaggaggttgaattatgcgagttacgctttacgagattgcccaggccactggggtatctgtctctactgtctcccgggtgcttaacaatgacaaaagcaaaccggccagcaaagcaaccacagagcgcatcataaaggcagcctacgatctgggatactatacacgcaccccggagactgagacatacattccagaaccggcgcacaggaatctcacctgctttctggcgtctgccagcgatacctacaatgattactttttctcccagcttctgctgggcatccaggaggagtccggacggatgggctattccattacacacaccctctccacttccacggaaagtgcggaatcgatctgcaaaagaatctccgacacctcaccggacggcgttattctgatgggacgtgtaagcaaaaaaataatgaattttcttaataccctaactctgaatatggtgtataccgggctgaataagctggatgtcagcattgaccaggtaatctgcgacggctacggggccattgtagattccgtgaattatttggtaaaatgtgggtttacaaagattggatttatagggacgattccctcagagaaatcggacatcttaaatgagcatcgtttccgcgctttttcagacgctgtaaaactcaatgatttgaagttagatatgaatctgtgcaaaaatattcagcttggcacagaacaggcctataatgctgttatagaattgctgagaagcggagagatcccagaggctttctgctgcgccaatgatatggtggccatcggggtaatcagcgcgctgacggattatcagtaccgtgtaccggaggatgtatctgtcattggtctggatgatatagagatggctaaatttatgaagcccagactcactacgtttaatatgcagaaccgggaattgggaaaatttgctgtgaagattctggacgacagaatcaacggccttcactccgtacccgcggtcatacagctaccaagcacattgatggtgcgtgacagctgtactcccaatcccagaaaacattcggcatccgtagaactccccaaggcagagcacaaaggctgacgcttaaaagctctgcgtcagcctttgtattaatctacggttttcatatcagcaaaattcatacggtatctcacccgtggtaactttggaatagtaatcaatccgctcaattatatgtgcaaattctttcatccttgttaccctgggataattgcagtcaggattttttgtcttatccttattgttaaagatggggtgccggagcatcttctccaatacctcttccccgctgtatccccacgcctcaaaacttttatccgatgccaggtggagatcccggttcagctgtattacccagtcaatgagcatcttcacctggaaatcaccctctgacacattttgtttggccagagcgttatatgccttccggtacttttccttacaccccaggccgttccattcaatcacagcaggaagcgccatagcgcaggcatctccgtggggcatgtggaagggctcctctcccataggatgggtaatcacgtgatcctggccgatgctggcaattcccagagaaaatcccgcatacatacaggccagactcattttatccgcgtattcatccacagccgggtttgctgcaaaggggcggatacagtcgccgatgagttccagtgagtgaagagaaaagagctcagtaaagtcgttggcactcatacttgtgtaggattccagtgcgtgtgtgagggcatccaccgctgtggcagccgcaatgtggaagggaagccccgccagcagatccggatccagaaccgcgtaggagggcagtatggaatcgtgggaaggcaccagtttgaatccattctcgtcacagattactgcgttgcggcacacgtcgcttccggtacctgcagtagaaggtactgcaatcattggataagtcttatgtttcagcggtacctggggcgggattccaataaaatccatgacttttttgccggaatccccaacgatggccacgcctttggcggtatccatggtgctgccgccccctactgcaatcattacctgggccccgaactcccggaatgccgggacagcctccccgtcaatggttgccgcttccggattagggcgcacattatcaaagatgaagtaggaaatccctgcctcttttaacattttttcaaagggatctatcacaccagccttgtaaagccccggatccgcgatgagcatcacacgatcccatccctctgtttccaaaatatttggaatcatctgtatgcaccctgatccctgatagatccgctgcataattccgaactgtaagtatttctttgttcttgccatatgaaacctccctgtttagtgtgtaccgtccaaaattgctccctgctcttttaagattttctggagttcgcttacatcaccctcaagctctctgggtgaaacaccttttttgctgcaaagagctcctgccacgcctgccgcctggcctgtgatcatggtctgatgcagatacctgagatatgcatcccggtctgtggatacatgtttccccgccaccagaaggttctctgctttctgcggaaccagacatctgtaaggaatatcataggatcccccgtccttcgggcagaccttttctacctgggcaatggtattcttgtcaactgtgtgatgggcccccgccttgaagtggctcttgccgataacatccccaaactccctgccctctgcaacgtcgtccctcgtcagcctgtagtcccccataattcttctgccttcccgcagccgcatctcgggacacatcctggtaaggtatgcattcttaaatccgggaatatatttgcggaagaacctgatggctattgcattctgtcttctgcactcaatctcgccttttgtcagatcccaggcatcgtctgtgaggacaaaggggacctgagaggaatgctgcatatgggcctgcaggtgcccgccctctcttggagtgatgaaaaagcctacgccgctgaattcatgccattcgcctgtctccagtcccatcttgtgaaagtcaataaatcccatcatctcaccgaacattgcaggatcattgcaggttttatagaactccagggctttctgatgggcctcctcttttctctcatcagaccagtggggaagcgtatgctcaaaccataccagctgctccggattctgatgaatccagttcatcagttcttcccagtccacaccatccattgtaaaggaaatggtatggggctgtacagtatttctgtccacatattcgtagggagcgccggctctcactgctatatctccctcacctgtacagtcaatgacaatcttgccctcaattacaaccgttccgttggtattctccacaacaattcccgttaccttttcttcttcctttgtcacgtcaaccacaagactgtgcagtaaaagttccacaccagcctcctccatcatctggaaaatagtgatagagaaccagtccggatccacataagagaaggtataccctgcctccaggcggtgttccggcttcagatggggaagggcatgcccctccttcagcattcggctgtgaatctcctcgatgattccccccgcgtcctgctcacccagaggattgaacagatgggcaaaggcaaatcccggagggcctgagaagcagagctggccccccagggatcctacccgctctaccagaagagtggatgcgcctgctctggctgcggcaatggctgcagccacccctgaggttccgcccccgcatacaattacatcatactttttgtcataaacgatttgatctcgtgccatagaaattccccctgtctattttttgaattcttcaattgattttgctatcgttccatccggaagtgcaaccggctccacaatcccttcgctgtgcagcgcccagggaagaatgactccggagtgaccccctctccccccgattaccacgacttccacatctttgggagtcctggtcaccggcatcggatggcggttggcaaagctggccggccgcacgggaaccagtccccggtttctaaccataggaacctcatggtatacatacgtgtggatatgttcctggatcatttcctttgtgtatccgctctttttcagcatcatcccgtggtcaggagtaaggcatactaccagcgggcctggcatataagcattgttggaacccagagtggtacagcagtgggttatggtatccaggagatcatggccgtccaggctgaggaaatctataatatcgtgaataggctccgccttcagcacatatacggttgtagtctcactgtcaaaatgatcctcgttaatcatattccactgtgccaaatccggctcctctgcaaagcagtaggtaaactcagcctgggaagcgatacagtcgagatcgcagatacccggaacagagcggaaaatattcataataaccaaattcaccgcccggccgatggtggcattggccggataccccggtccctggcagccctgccggccggaaatacccagctcccgggctataggtcctgacacaatcaccatgtttccgccgggatgggaggttgttacagactggttcaggttatacagaggactatttaatgccttgaatacagcaatcagcaccggcatggcattaggcttgcatcccgccataacagcggctatggctacatcctttacggtcacctccttgccgctgggtccgctggcgctgcacaacaccatatcttccgggaaggggcagtattccatcatcctctcatatctggcctttgtggggggaatgatggggagaccgtcgctgatatgttcctggttaaagaagtcattgatttcttccagataagcccctggttccagcagcttttcttcttctaccgaaaggttctctgacaggggaagaagtccgtcctctctcgggggaatcttatccatcttgaaatcgatgcgcgccagttcctccagctcttttccgtttgttgtaagggaacggataatataatcccattttttatctacttcagcctcaatctcctctacagtactggcctgatagatatctaccgaacacaggcagagatgaccggccctgtagacgcccacgccttcggtgatcccggttccgggaggtgctgtcatatatacggtgggaattcccagctcctccagagcaatggataacacggttgtagatgaggaggtccccatatccccaaatgccacaattgccgcagaaggtttttctttcgccagcatctgcgcgtattccttcagtttgcccgcgtcctttcctctcacggtctccgtatactccacaaagttttcaattcccagttctctcagatgttccttgatgcggtcaaatacggtgtagtaattgcagaatcccaattttgtattattataaaacaggatttttcctgtctttaattcttccagggatactcttgttgccagtgtaatctttctcctctcttgataccccctgggatcgagaatcgaatggaactgtaatgccataaatacctctcctttcctgaagcttgatttgttattgtcttttcgttgctaacattgttgcagttttttcaggtattttcaacagttccagaccatgtgtcaattaattcattttgccaaaaacttgacacctttttttgcctgtcatttttttgtcataccctgaaaatgccaaagctcctgtttctattctcccggcagagaaaatccgttaagatataacaaaaagaagggaggatacacgttatgcccactggtgtattagtaaatggaatctgcgttgtgataggaggaatctttggggggctttttggcaagaagctgccaaagtatattgtaaatacgctgcctaatatttttggcatctcagcaatgagcatggggattagcctgattgtgcacgtttcgtctctgtctgccgtgatacttgccctcatcgtaggaaccctaattggggagacgcttcatctggagaccaggatcagcagcgggctccaccgcatcctgtgcaggaaccagcaaagcgaccggcaggcggagttcatgtctgttatgattagcatgatagttttattcggcttcagcggcacaggggtattcggcgctctcaattctggcttctccggggaccataccatattatttgccaagtcaatccttgacttttttacggctattatcttcggcgccacactggggtatgccatctgtattacggcagttccccaaaccactctggggcttatcctgtttttctgctcatcctcgctgctccctctgctgacagaccccatgatcgctgattttaaggcctgcgggggaatgataacctttgcggtagggctgaagatgaccaaaatcaaacactataatgtgctgaatctggtacccgccctgattctggttatgccgttctcttacctgtgggggcttctgcccttttgatgggaagccctgggtgcaaaaaggagaaaaggccaggatatgtctctcctgccttttctcctttttgcactccgcatacacggtattgtattatatgggcctgctctttgctatcatctccaggataaagtccctgctctcctgcttactcatattccggtggggatgagattttacaaaattcgtacagctgtaaaacagagaggccactaccgacggctcttccgtaatcagagcacaggcccccttctctgtctcataatgcgtccccacgaatcccgccacctcccgctctttgacaaacagggcaatatcctcatagggatacagcatagaatagtctgtcaggaggatattgaaattgtcatatgcgcacatggtctccaatccctgtacgagcaatttgcggaatacggcctgggacacataaaaaggcctgcccagacagtgggagagaaagcgcatcataacccggttcatcttaagcagacgcctgagctgcttttcatgtataatataagtgataggcatactggatacatttctcatatattcaaaggaacattgatagagagtaaattcatattcctttttttctttttccgtgtaatcattttccatcagagcctccctcaggtacttctctgacaccatataaagaatgggagcgccggaaaagtagtaaaccgggttgggatcctgtacaatctttttaaatactgagaaaaactctccgttgctctcaaacccatatctgtgaaacatacgcagtgactgatgaaagagttccatcagcacttccctggcgttttgtagaacctcggggtccgtaaagagataggtctgtatctttttggtgaatttctctgaggtgacacctataagcacggccatattctcagccagaaaaatcgttatctttatctccggatcccaatacttgggaatatagtaggccagggcattccccaccagatgtatggggagccaccggaacatagactgagccacctgccggtacctccggtccacgggatgtatcacatgtatggtattgttgttactcagaacatcaaaattcttgtcctgccagcgcagctgatattcctcactctcagaaaaccaccggttatcctcctgagagaacagccacagattgttgccgctgcttccggccacatagtccagaaaggcatctaccgcatctcttcttccatcttcccctgaaaatatgtagtattcactttttactgctttcctggacataaaattctctatcgaattccgttcagattcaggattcttcgaagccagccagaattccagcagagtcacaagagcgtcttccttctgcttttctttctctgtaaactttctgctcagcaggttttctatccgcttatactcatacttggcatccagagccacaaaaagcttggcaattttatgggtatattccggattgagacgccgcttctcgctcctccatttgcttaccagggagtaatccacattcagatattctgccagctgctttcccgctaagtgaaattcctttaataactggtttaaatgtgataacgctgtattcggcataggcttgtcatccttccttacttggtttgtactatactattttatgcttgggagataagtatatcataagggattttatataaaaagggaatgggcgtcacatacttgggagaacttttttcacagacggatgagtgcggttcggacaccgaaccgcactcatcctggttataatattcctaaagatgcacaggatacggaagactccggctgtagtccggatcagccccagattccatagcctcccacgagggcgtatattacgctgatagccagaagtaccacggaccatacgatcatccggtacataaggccctgtcttgtctctgcgtctgccgaagagagcataagagcgccgttttgagagaacgggcacatgccggtatagcatgccgtaatgatgagggcggtaatcatagccagtgtgctggcgctggttccgctttgggttaatccataaatcataggcagcatcagaggatataccacagaaagtgcactgcagaagaagcttaagattcctccgaaaagtgcgaatgccgccggaagtgcccatgcagggaaattcgagttgagccaggtgccgatgacatctgcgattccggcctttacagctacggtcataagcatagacacgccgcagatcagtaccatagcataccatggtacattcttggccagtatctctttctcatcacccagcttcagcatcatacaggcaatcgccccaaatactgagcagacctgaatattaatgtgggatgccaaaaatgcggtaacagaatttgcaacgataaggttcagaatcagaggcagcatatttgccactaatacaatgagcagaatcgccagtgtctgtttctgctttttattaaacggcgccggcttatccatagtaaccggctgtgctttaaagccgcggcacagaaaatagcagatgataaatgcaacaatacagcagggaatggacgcgaatccaaacttataggcaaggctagtggcttcctcgggatttgcccatcccgcattctgtataagacctatgtttgtaggtccccctgcagcccagggcagcccccctgtggccaaagcacccacatttgtagcaataacaacgagtataggatcaaattttgccttcttggctatggcgaatccaataggagctacaaatacaatgccccatacgcccacaccaattccggaaataataaacgctgtgagaaacacggagataggagtaaaccagggaatcccttttgtgacatagacaattctgtcagccagcgccgacagcgtcccgttgttggatgcatacccgaaaaatacactggttactaaaaggataaacataatattgacaggccagtaggcgatcacttcatagatggtcgccggtcccagccaggaaccgattaaaaaagcaaaagcaatgccgatcagtcctatgttgttgtcaaacttaacaccgatcagtaccgtaattacaattgccaccattactaaaatcataattgcagaattactcagcatataataccctcccattttttagtattattccttctcataccccttgctgtacacgttttttaccggaatctccggctttggcaaaggcaggtatcccacctttttcatcaggggctcattgtattcatagagtacatccaccagggcctttccaatcattggatctaccatagtagggtgggcaacccagctcccgccgggagccatcagctcaacccggaagcgtatttccttaaccctctcctcataggtagccccgggacggtccaggattccctggttgtcgaatccccctacaaagcacagttcttttctgtatttttgtttgagcgcaaagggatcattctgaatctgaagagggttcagggcatctgcccccaagtcaataaactcttctatcaggggcgccacatatccgcaggaatggtgttcatacagcattccctctccatgtacggcctccacaattcttttcagcctgggcttgaagatccgtctccaggtttccacagacataaaggtatttctggcctccccatagtcatcgtgaaactggatcttatccggcttgtagtactttgcaatgagctggatctgacggattctgaaatctgccagggcatccaaaaagtcgcagaccgcatcctcggcagtgagcagaaagcagagggcatcctcaaatccggtaagggaatgaagctgttcaaataatccattgatcataattacgctgcttattttgttttttctgtcccatcccgcagtatcccttgccgcactctcctcccagggccaggactcacaatccggcatgggaagcgtctccctccagtcttctatgtcctccaggcgtctggtgccttttgtcaccatagggccttcgtccccgggacggtaatcccaggagataccgaaacagtctacaaaccttccaaatcccttcaccccttcctgcgtggcagtatacaggcatgtattctggtccaggtactgggaggggacccaatagggttcctcgtgatgataggccatcagaatgttttccctagctgtcatcatttactttcctccttcatcgttttcttacaatagatagaattcccttattgttatcaacaatcttatattctaaacccattattttcaatataatgggaggatgtgtccatattacctgtggacattttcttgacattagccccttacaacagggctttcagggagaagagcaaaccagcggcctgccctgcgatagtacaacgccggaccggccgctggctgcggactataaaaatcccttcattacaattacctttttctgggtcagttcctcaagagtatagaacccctctcttccgactccgctcatcttatatcctccaaagggctgcatcatatttctgtatacccctaccccgtttaccactacgccgccggattgaatcgctcttgccatctgcatgcctaacttccagtctttggtgtacacacaccccgacaggccgtatctgctggcattggcaatttccaccgcttcctcgggcgtatcaaagcctataatgggaaccactggtccgaaaatttcaagatcctttgcaatatccatttccttagtcacatctcccagaaccgtaggctcataaaaagctccctgccggcgtccgccccacagcagcttcgctccctgtgccagggtatggtttaccttctcctccacccccttcgccgcccgttccgatatcaggcagttcattttcatcgtcccgggcttaagctcattgaaatcccggttcagatacgcttctatctcagctctccggtctactccgtatcccatttcaatagattttgctttcgcaaccgctgcctcagtaaattcccgaaggagagaattatgtacgataaagcgtttcggagcaatacacacctgcccggccgcattaaatctccagttaattccctcccgggaagcagtctcaaagtcagcatcctcacaaacaatatagggatcatttccccccagctccagggcgcagggggccagccttttggccactgtctctgctatctccacccccacctctgtacttcccgtcagggtcaccgcgtggatccggggatctgcggacagataagggcctacggtttcccctcttcctgtaatcagctggagtgtatcacccggaactcctgcctcccacaaaagctccgtgatacgaatcaatgccagaggattggttgtaggcggcttcacaattaccgcgttgccggcgcacagtgcagaagctactttataggcaaaaagcatcagcggcgcattaaagggaataatcgtcagcacagtgcccaggggttcatggacgaccatctggagatccttctctgtcttcccatcgtggcccgcctcggttcccggcaccagaatgcttccgttcaggcgtttcgcactttccagatagcctttaaagaggtccggcactccctgatactgaaacaggcaggtgcgcacgctaaaaccgctttccagaacatgaatactcacaatttcttttttgttctcctccagcagctcataaaatctgttaaatattttttctttctgcatgagagaaattgcgttccatttcttaaagccgtttttcgaacattccagggcctcatccatatcttctctgcccgccgccggaacagtatccagaatttccccatctgctggattggtcaccgcaattgtctctttgtcccgggcatctacttttttaccattaatcagcatcttcatagtacaacttcctccctttcggttgcttggtatcctttcactgtataagtacaatgtatttttttcaaactcttttgtcaatcattataatattactgtcccttattacagatgacaataaattgacaggtaaattttctggtttttttgactaaaaacggcacaggtcaccagacatttttctggtacctgtgccgttttcttttacttgagaactcataatcaatcccctggatgtcaatccagtacaccgcagatggcctcctggttcacatacgccaccagctgatctgccatactctcggaaagccccagatcccagagcagttgaagtatggtataccggctgcgggtttcctttgcatacacaattccattccagagcatttcatcggtgattcccttctgcgcgggataatagggcgcatccagctgcttcagcagggacttcatgcgctcagccttcgggagctctcgcagaagtccctggatttcctcccagtgctcctgaataacgtcgattcgttttaacactccctctgtcctgttcttcccactgtcccgttctaattggattatcccggctgcagcagccccgtacacacggcgtatgtctgtctcccactgctccgggcagtaggatctggcatggtttcgggcagcttcaaagttcacaggtgtgatctgcagcagctcagctgcccgcagaatcatgactgtgccgatacccactttagcaccgtgcaaaaccggagggagatccttctggagaaacagcatctcccaatagtgagaaagatggtgctcacaaccggcggccggcctggaattccccgcaaagctcatagctacgccggtttgtaccagggcctccataaccttccctaccgcttcctgatccttctcttttacccgggcagcattttggtacacgtcctgaatacagttgtttaccatatcaaccatggcctggcagtaatactctccattgataattctggacagcttccagtcacagagacaagtgaatttccccagtatatctcccagaccggctgatatcatgggaaacggcgcatcttttaagattgccgtatctccgatgataagtctgggggaatgtgtctcgtaggtggtcttgcaatgccctgtaatgagggccgctactgtagatgcaaatccatccatgggaggagcggttgccactgttacaaagggtctttttgtccgataactgaagaaacggaccaaatcatttatagagccggtgcccactgctatcattacctcaaagtccgggttcagggcaagaagcatttcccccagggcttcctcatccggtaccagtgccttggtacggaatacatggttttgaacggagaatccttcttttgccagcatctcacggatgcgtcttcccgcaatctcataggtaatatcgtcactgacaagatagatgtgacggtagccgaatttccggagataatccggaagcatctctacggcattctctttgatttctgccgcctccagtctggtatagtgggtccgtccgcagctgcactcaaatacctttcccagataatctgtcagcttcattgtcttcccgtctattctcatttcctgcatctccttttattctgtaaagatgatttaaaacctgggtgcctcccctgccaaaatggtcgtgcaggctcctgaattcctgaaataagacctcatactgcctgacgctctggggatccggatgatagacagtgccttctctgcagtgcatggaggatatggcctcatccaaggtatcatatccccccctgcttctccctgcagccgcggctgcaaatatagcagagcccagggcacaggcctgactgcagccggccacccgaatgtcccggttcaggatatccgcatagatctgcatgagaagattgtttttctgcgctatccctcccactgcgcagatctcatttacctccagtccatgtccggcaaagttgtccacgaccatccgggcgctgaatccggtagcctccagaaccgcccggaagatatcctcaggctttgtctgaagtgtaagtcccaagagcactccgctgagttttgtatccgcaagcacacttctgttcccgttccaccagtccagagccagcagcccattttcccccgcacgaaggcaggatgctttttgtgtcagaagttctaatacagagagctgcttttctccggcctccttctccagactttcattgacacaattctgtgcgcaccacccaaagatgtccccgcagccggacagtcctgcctcatacccataaagtcccgggatcacagctccataggataccccgcacatccctttgaagcatacctcccgccgggacagcagcgtcatccccataccggttcctataatcatcacaagctttccgggtgtgttcacccccacagcagcagaagccgaatgtgcgtcaatcctggccggggccacagccgtccccggggccagggaagtcagtgctgccccctcccgtgtcaggcttccaatccttacatccagagggtaaatctctgattccgggcaaagcttcttacggaccagctcctttgccgacgggtccagggcctcgaaaaaagcatccggcggatagccgcgggagggatcccacaggaatttcagcccggccatacaatagttcatcgtccgctttcctgtaagcttacaattgatccagtctcctgcctccatgaagcaatgtgctgcctgatagacctcaggggctttttgtgccgtctctaagattttaggtatggcccattccgacaggatccggctgccataccgtctcagaaagggttctccccgctgttttgctatgcgtgtgatctcatctgcctgggcagatgccgtatgctgcttccacatcttaacgtaagcatggggattatcccggaatcttttctgattgcaaagtggttcccccacttcatctaccgccagaagggagcaggaagtaaaatctacccccagaccaacgatatcctcttttggaataccggaatttctcacaaggcctttgacggcctctgccatagaagtaatataatcattgggatcctggagtgcggacaatggaggaagtaaagtcccgtccggcagttctgtttccataactccccgggcgtagctgctgacctgttcccccgcctgtctcccgtcctctacagaaaataaaactgcccgcactgacaggcttccaaaatcaatgccaatggtgtatttgcttcccataacggttactcgtcctctctgctgccgtaccggattgcctcatcatacatagcaatgacattttccggcctgacaccgtactgaatgttatgtaccgggttaaacacaaaacctccccctttccggaagatatcgatccgttcccttacctgggccctgacttcctttggcgttccaaactgcagggttgtctgggtatccgccccgccgccccagaagacaatatcttttccgaattcctccttcagggcagccggatccatgcctgcggccgttgtctgcaccggattaataatgtcaattcctgcctcaatcatatagcccaggatattccggatcgatccacagctgtggtacatagttttggcatggctgtgactgtgcacatagtcgttaaccttcttcaggttgggcagatagagatctctgaagatatcaggatgaaacagttccctgtcctgtgtgccgtaatctgtggttgacataaatatagtgtcaatataaggctctactgcttccaggtacagtttcaggttctctatggccctgtctgctgtagcttccagaatctcatacacatattccgggtctgtacagaggcggcaaagccagtctgtaaattcatggcccgcgaatatactcgtggatgtcatacgaagcttgccaaatcctccgctcacagaaaattccgtgtgattgtaaaggtcctttgccctctgctccaatagtttcagctcttcgtcacggtagagggggatagaccttctccacacttccggatccataaggtgatcgtcatctgcagagacagccagtgcaggatcgttatacctctcaaaatacagcccgcccttctggggcatgaacgccaccttccgccccttttgattgcgcagaattaggtatccctcatcgtcatattccggggcaaagcccccgggcacctgcacggtatgtccctttcctgtggtccagtttttccaatctttattgtccagctcccaggtctcacagacattctccagctgaattacatcgcacttgaagcgggagagtatcggctcctctactctggccagcatctgaaactgatcgtaaaccttaggtatccctacctcaagtcccagcaactgtgccacctccagatactcgtccacatgaattccagaagccttcgtgcccccgagatctatggggagttcctctgtttcttcgtgatttattgcttttctgatccgttctctggatgtcatctgcacttctcctctctgttttgcccagttgtctgtttacaagatagattcattatttttacctgggacgcttcctctttttttaattctccgctgacccttccgtcagacagaaccacaaagcgatcacacagggcatataattcagggagctccgatgatacgataacaatagacatccctcccgccgccagatctgctattacccggtaaatctcacttttggcgcccacatctacccctctggtcggctcgtccagcaacagcactctgggattggttattatacacttgcccagcaaaaccttctgctggtttccaccgctgagggacaggatcccggcatccagtgagggagccttgatgtgaagcatcttaaaatatttctctgctaattccttttctttcttccggtctataaacggtcctttcttcagcttgtccagatagcttaatgtaagattctgccggacattcatggacttcacgtaaccgtccctctttctgtcttcattcagcaaagagatcccgtaggcggatgcagtcttcccccgggacatagccagctcctttccgtccaggaagatacaccccgcttttttcttcatgatgccgtagaccgcgcggagagtttcgcttctgcccgcgcccaccagaccggccagccctaaaacctcgccggcgcgcacggaaaaactcacgtgatccacaatatttacctttttattataggggtgggggaccgtaaagtcctccaccctaagcacctcctccccgattgtcttagggaccgagggatacatcttttccatcttccggccgataatgtcctccacaatctgttctgaatcatactctggcccggagtattcggagataaatgtgccgtcccgcagaactaccacccggtcagagatgtggaatacctcttccagcttgtgagagatataaatacaggagatcccttccccctggagcctgcgcaggatattcacaagaaattttgtctcagattccgtgagtgcggcagtgggttcatccagaatcagaacatgagggtttaggataagggatctggcaatgcagatcagctgctgtatgctggcgcttaaattgcgcaccagcatatttacatccagttctatccccagagttttaagcacatcctctgcctcctgcttcatccgtttccaatcaaccattcctcgcggtgtcttcggaatatggcctacaaaaatattctctgccaccgtcaaatccaattccaggttgatttcctgataaatcatggcaatcccggcattttgtgcatcccttggggaacgaaacgttttttctttcccctgtacctctatagttcctgtatagctgcccgccggatagatcccgcttactattttcatgagcgtagattttcctgccccattttcccccaaaattgccaggatttctccctttgtcagggcaatgcttacattttgcagtacctgattatcataaaagctcttgcagatatgattcacagacagaacgatttcttttccctgcataatatttccccctttgtctttgaatcttaatcctctgcggttttagagcgtttaatctgatcgataataacagcaactaccaatgcggccccgattacaaagttctgccagtatgcagatatcttcataatggtcatactgctggaaagaatgttcataaatataacgccgatcactgtaccagccagggtacctttccctccgtatgtactggttcccccgataaccaccgcggcaattacctgcagttcatatcccgttcccgcagaaggctgtccggatcccaggcgggaggacatcaggacaccatccagcgcagacaatgttccgatgattgcatacaggctgatcataatagcatcaatattgattcctgctacccgggctgtctcaatattgccccctatggcatagatcttccgcccatatacggtatatctcataatgataaaaaagacggcggccagaatcattgcacacaccactgctgtgggtatgcccagaataatattctgctgttcaatagccttaaacgcctccggaagaggaaagattggagttccctgagtgataacatatacaagtccccgggccatatagtacatccccagtgtcatcataatcggcggaatctttagctttacgataactactccgtttaatatcccgcaggccataccggacagcagtcccagaagaacgcttggaacgatcggcagtccgtttgtaagacaatacgcggtgactacacctcccagaccatagacagagcccacagaaagatccagtcccccggagattaaaatcagtgtcattcccagggccggtataagcatatagccgctggagcgcaaaatacttaatacatttagctttgtaaggaataaagggtttaccatctgcactataatgattaacaaaatggtgggaatcataatcccaatctcctttacccgaaagatatttttaatgatcaattctttttttatgcctgtctgttctctactcatatccatgccctgctttcccaactgtatgcaatctggtccatccttacttagcgccggttgcttccgaccagtccttatccgggtagtctgtgtcgaaccactgctttccttccttgaaatgatctgcaaagctgtctacgttctctgcattgataggggtaacaccggcgtccacaaacgtttctgccggctgtgcgccaaacatctttttcatatacgtccacatagccggccggtacccatactgaaagtaattttgtgcgagggatcccagcacatagccgctgttaatctcttccagacagtcttcctgcattccatccccaaatataataacactgcctggttctttccccatttctttcatcgcctgggcaatggcagccgcacattctccgccgcagcagacaactgcatttacctcaggatacgcagtaaatagatccttggcatgctggagcgctaccgtggcatcgctgtctgaactcagctgctgcactacttcaaatccggcctcatgctctgcaaatgccttttcatagccttccataacgccgatggcaagctcggagtccagctgataaagcatctctgccgcaacaattttctttccctccagcgccttgctcacctcttttcctcccagatacccccagtttacagcatccggattacatcctcctgccaggtactgatgcagattcggtgtgtccccccctgcggtgtaaaggtcaatgccggcctcatagcagtctttgaagcaggattccatagcggattcacttaggccaaaggtagcaatcccgtcggcaccttccgcgatagccagctcaatacatttgatcatctcattggcatccaggcctgtgggccccacccagctgacctccagtcccggaaaatctttctgggcctgctcaattccctcctttgccccaagccatacctggtgggcaatcagcggcgtaacaaatacaaacttaaccttatccccattttccgcatctgtcttagcctcctcaggagcctgtgtctctttttccggttccttttccgctgtttcatctttccctccgcacccggccagcatacctgctgccagaaccatgctgaggattagagccgcacccttttttacactctttttgattctttttctcatacaaaatacctctccttcttttattttgtccgggtcttttcccgatgtctgtattattgcagatgcatccctctctgtccacgggataattttcagattaggtggactctggttgtgagttttcagttatccattatttggtagttcatttgacttgcaagtcaaaaatagatatggtacgttaaccttaagtttacagaatcctgcagccggttgcagaaggaggcgtttttagcgatgttaaaggttttgattgcggatgatgaaacactggtatgtgaattaattaagatgtccatagactggggcgcccttgggctggaagtgtcaggaactgcctataacgggctcgaagcactggagatggctctgaagataaagccggacattgttataactgatgtgcgaatggctggtttggacggtttgtctctgattgaggggatccggaatgccaggcttgactgccgctttatcattatcagcggctatcctgattttagttatgcacaaaaggctcttaagctcagcgtcttcgagtacatactaaagcctattgacgaggtaaccctgacggaggccctaatccgcctccgcaataaaatacagctggacggcgaagcctcctctcagatatcagcctataaaagtcagctggatcacaatctggaactgatgcggtcccgttttctaacggaacagctatccctatcccggccttttgatatgcctctgaaggagattaacgaaacctaccaattccagtttcagtatgcggtatatgcagctatggttgtaaaagtagacagtatctttgaagaaagccagccctcggatatggatactcttctcctgcggaaaatgtgtgccgcaacccagcagcgaatgaataagggaggagttctgtcctactcaattgtcaagccggggcgtctgatcagcattgtaaactgtaccatggaacaggcagcggatctatataacctttcccaggcggttctctatgagctccagaaccgggatgaatggtttaaccaatatacatttaccataggacttggcactatgacagacagcctggacaagattcaccactctctcgctgctgccgacacagcggtaaaataccgtattgtcaatggggtaaatagggtaattaattctgcctccctgtcttttcctcactacagcatccgtgattatatcactgtagatgatgaaaaaaccttttttcacctcatacagaactgcgatatgattgagctgaaaaactggattctctctctgtttcaaagtcctcatattatcaagtacgcttccccgcccctgctttttgatctggcggaaaagtgtgcggacatctttggggaggctgtaaagacgctggatccggacagtatgccccgcagtgagatactccgccaggcactggacaactgccgctctctggaagatatcctccggacacttctggagcatatacagtcctttgcacaggactattataccagtcggactgaaacctacagcaagcccatccagatgatgaaagactacgtgctcctccactacagagaacccataaagttaaatgacatggctgagctggtacatttccaccccaattacctgagtgagcttttccggaaggagacgggtatgaccttcagtgactatctcaccgactgccggctggatgctgccaaaaggctgctcctggatcttcagtataatgtgtatgatgtagcagagctggtgggaattaaagataccaaatatttcagccggatattcaagaaagcggtgggtgtcaccccaagcgaataccgaaagctgcatatgtagccgctaaaaagcggtttttgtccgtaaccagctgccgcgggataggaggtcttctaatgaagaacatattttacaaaatcaaagacctggatatttcagagcttttcagcctgaagcataagacagttttcttttttgttctcagtctggctgcgaatgttttagtctctcttctggtatccctgtcctgtatccgaaggatcctgagagcgcaaaaagaacatctgtcacttgggttttccggcatttatcttccgctgctcctgagcggggtgcttttactgatcctggctgccgcttcaggcctactgttctataagaccgtttatcagcctatttttaaaatagatgaggcactgcacaaaattatggatgtggatcccaattatgagataaccgtcagcaggcagagtgagctttaccccgtggcaaaaagtctgaaccagattctgctccggctaaaagggtatatggaccgtgaatacagtgaaaaaattctgcggaagcagatggaaattaaggctcttcagagccagattaacccacatttcctctacaattccctggactgtatccggggagaggcgctgatgcagaatgcgcccaacattgcccatatgaccaaagccttatccaacctgttccggtactccatgtcccacgactccagtctggtaaccttccgcgcggaactggagcatgtgaataattatatgatcgtccagcaataccggtttaacaacaaatttaccatgcatcagcagattgagcgcactgcaggttttaacctcatggactataagcttccccgcatgacccttcagcctattgtggagaatgccataatccatggtctggaaactaggctgaaacccggaaatatatggatcagcgcctatgcaaccagccagagagtggtaataaccattgaggatgacggtatcgggctatcccaggaaaaaatgaatgaactcaatgagagtttcacccgtcctgtgtcccagagcatagagcaggaggaggactatgtacccaaaagtattgcactgcccaacattaatgaacggattaagcttacgtacggggatgaattcggactgcagatcgccggaactctgcagcttggcacaaatgtagagatcacactgccggcacctaaatcaaacatggaatttaccggagggatttatgaaaacagaacttctgcgggcagatcatatcacaaaatcttataatcgcatacgtgtcctgaaccacaccagcttccatatctttactggtgaaatcctggcaattatcggtgaaaacggggccggaaaatctactcttgtgaagatcctcatcggggagacctctgcagattccggaaggatctattataagggccagctgctcactgcagtcaattccgcgaagctggcatccatgggaattggcgtagtgcatcagaagcctctgctggtgccatttctcagcattatggagaatatatatgtgatccgccgcaccgggcagggggaaatctttatcgatcgccggaaatatatccggcagacccgggagcttctgaaaaactttcagctagacttttctcccctcaccaaagtatccagactctccttcgcccagcagcggatgatcgagatattgaaagcaatctcgatccatccccagctgcttattttggatgagccggcccacccattctcagaacaggattttcagctttttcagaatattcttctgaagctgaaacaaatgggcacctctgttcttctcattacccacaatattgatgaggttatggcactggccgaccgtgtggttgtcctgcgggacggcagtaccgtatttaacaaaaaagccggacagtttctgaaaagtaccctgcttcaggtgcttctggcgggtcccccttcaagtacctataccgcccccttaagatgtgaggatcaggaggtgcttcgtgttgagcatctggctgcgggcaaggtactgaaggatattaccttctctctgaaaaaaggagagattctgggaatcaccggcctgtcgggttccggaaaatccactctcctctatgcccttttcggcctggaaagggtaaagcacggagagatttttatccatgataaaaagtgctccatctcctcccccagagatgccataaggcagggacttggtctgattgtggaaaacagatttgaaaatggattgattatgcatatgacaaccgccttcaaccttatgctgtgctctctgaaccggatcagccgatgggggtttgttctcccccatctggaatcctatctggtgaaatatctgacggaaaaactggggatctctcccccttccccttatctgactgttgatcacttaagcggaggaaaccagcagaaggtacttctggtaaaatcgttggcggccaaaccctccattttgttaatggatcagcccacctcagctattgatatgacctccaaaaaggagctttatctaacgctctcgcagatcgcacaggaggggacctctatccttcttgtctcaaatgagctccatgaggtctgtgggatctgcaacagggttctggttatcaacaatgggtgcattgatgagaagctgtccaggcagccgcactgatcccaggcagccacggctctcagccggatttccattaccgatatttatttccttgacaaataaaactctgtgtattactatatacataccgacggtatgtatcaaaaaaaaggagacacaacacaaatggccaggaataaatatccggaagaaaccatacagaaaatattggacgtatcttatcgcctgtttttagaaaaggggtatgaacatacctctatacaggatattgtccatgcaattggtatgtccaaaggggccatctatcatcattttaaatcaaaggatgagatcctggaacggatctgtgagcaatattacagtgatatacagtggctggacgatattcttcaggactcttccctgaacagcctggagaaattaaaaaagatctattactatgaactgaacgatgaaaagaagcgaagctacgacatcatagcccttcctatgctgaaaaatcccaatatgattgtcatgcagcttcaggaggctatacatgagactgggcctctcctgacaaagctgattgaggagggaaatgcggacggaagtatgcacgtgaagtatccccgccagctagccgagactatgatcctcctggtgaatatctggattagtccgggatgcattcccgtatcccgtgatgactttttcaaaaagatacttttctatcaggatatgctggagaatctggggcttccattgatagacggcaaatttgtgaacgtctgcatgggatactatgatgcggtattcagctctgtgtcctgggacacataacctattatatgccccttcgggggtaattcttttatgcatatacataccaacggttggtattaaaggaggctaagaatgaatactcaaaaattatttcacaaagattttacgattatggtccttggacagattatttcccttttcggaaactctatcctgcgctttaccctttcgctgtatattctggacaccaccggatctgccgctgttttcgggagcatccttgccgtttccatgattcctacggtgctgctgtctccttttggaggcgtattggcagaccgggtgaaccggcggaatattatggtggttctggactactgcacttcatttatcatctttttatttgctctgttgtttttcaacagttcttcccctgtgatcgcagtagggctggtgatggtcctgctctctgtcatccaggcatgctaccagccgtctgtgcagtccagcataccggtcctggtctcccaggataatctcatgaaggctaacggaattgtcattcaggtgaatgcgctctccaatctgctgggccctattctggcagggatcctgtacagctttgtacccctccggctgaatctcatcatcagctgcatctgctttttcttctctgccacaatggaattgttcctgcatattcctttttttcctcaggaaaagaccgggggcctggtctctatggtgaaaaaggatctgggggaggcctttcattttctccgcagagagcggcctgatatgatgcgggtacttgtggtcattgcctgcattaacctgtttctgtcggctatgataattgtaggacttccagttattattaaaatatacctggggctctccacccagcactattcctttgcagacgcggcggtggcgctgggtacgatactgggcagctgtctcaccagtatcttccccgaaaagatacactttaagacttcctaccgcttcctcctgggttccagcattgcgctgcttcccatgggccttgcggtagtcacaaaccggtcccccggtctgtcctacggcattcttatggtcttcctgatcctcgccctgagttccgcggccgtatttaatgttgctgcccaaacctacgcgcagcaacagacgccgatccagtatctggggaaggtaggttcctttattactgtgatctgcgtctgtgcactgcctctgggtcaggccatgtatggggggctgtttcagcttttccagaattccgtaagcattgttatattttttgcctgccttatcagcattttcattagcttatacacgaaaaagactttaaaagctctgagggagtagttacgccctttttacgggatggcggatcaccgtctttaaccgttcgggagccgtcctccgtggatcccccagatagatctcgtggtggagccggttctctccaatgtctgtgacaaacccggactctgcaataaattgttccagcttttctatggcagccggctcatcgtcatagggaccgatgtgcatcacctgacagcagagtccctctgtgtacttcacaagccttgcaggggatagatccagttctggctttttcttctgcagggctttctttgctgtctcaaagacttcctgtgtcacaaattccggctggcggatcatggccgtccagcaaaatttattcttatctgttatggttctgccgtcaaagtatccatcctcaccccaccagaggccctccagagggggaaccacatactcaaaatatccttccggctgtgtcccgctcatcttactcattttaataccgaaggacagaccgtatagtatttccatggcggttttatactcctctgaggtgtttggatcgccctttccgtccaccataataaatatcatctccggcacgtctatgacagaaggctttgtttttggaagatacagatctttatagacctttttataatccagcttttccggtttctgttccattttcttaaccctgccttttgcttttttgggctgctgaagctccgtgcaggtttcctgcaccagagccttcaaaaattcccggtcctccagatcctccacgcaatacattcctggtgtccccccgtggggtgccgcaggttctgcctccgggagcattctgtgtccggcgtcagttatcttaatatagaactggttgtcctcaactgttccgaagaaaagtccatggcaccacagaccatattctccaaaaagtttcttatacgtaatctctcccgcctccgccagctgtcctgctacatatttcacaaattccaatgtagacgccatgtcttctccctccctgtttttccgataaatactactcttctctcagtgcgatatacatatggatttctgcattttccatatcattgttctggtattcttcaaagtcacaggtaaaagcccggggcagctccatggcccacagtctgctccagaaatcaccggctgcgttttccatatgtcccctgacaataaaacgggcatactttccagccggtatctttcgaacctctgtcccctccggcatattgccttccctctctatctcacaggccacagcagctgtgtagtcatctttttcgtctcccgcataatccgtatagatgcccagtgccttctcattgcttttatgctcaatagccggatatagatccggtgagaaaaagcgctcccagaggcctccaatgactgcccccatatccggtgaagtattattggtcctggcactgatggctgctacggtcttttcctctaactctacgatgtcataattcatactgttttcctcatttctatttgataaggtaaggataacacagaaaacaggacatctatatgtcgtctttatagtattttttccctatttcttttatgatacagcagaactcccggcggagatcctccggctccagaagttcacatttattcccaaagctcagtatccaggaataaaggctgtccttatcggcaaatcccgatgaaaacagaagccttccgtcttcctgctcctgaaagctgtcaatcccgtattcctcgataagcctccacttcatatcaggttccagcagcacggacgcccggattaggtaaggaaatattctttcattgtcaatctcaaaagggggaacctccctgggaataaaagtctcgcctgtagtatccagcttcagcatccggttcagcttaaacatccggtaatcctgcctctccagacaatacccccatacataccaggatgcccactgaaaaagaagcagatacggctcaatcctccgcacactctcccccttggggctgtaataggcaaatgaaatggactccgttttgtcaatggccctctgaattagttcgatcttcggagccagagaagatttataccaggaggacaggtcaatgagaatatggctgttggaagtaagaacagaggaattgcccgcagacagcttttccataagctgctggtatctgttggtgccgcacacactgtccagactcctgagaccggccagtatagactgcatatccgaagaggtgagaagagtccgatccatacggtacccctccataatggaaatcccgccgttcttcccctggattgtcacaatagggatacctgccctgcagatatcctcaatgtcacggttaatggtacgccttgaaacctcaaacttctcagccaggtagggagcagttaccttctgctgctgaagaaggatagagagtattccaatcaaacgatctattttcatgaaggtgactccttttctgtagtaataggtacattgtagcatactcagggcaattggggacagggcatttgcaaaatgggacaggccgatcccaaagtgggacgtgttctttctagaaagaacacgtcccactcagactgtagacaaattggttttgggctttgtatcccagagccagttttcttttattaaccaaattgcgttccaaataaagtttgtgtaaggggcttctccctctagaagcccccatttctctttcatcctggccagctttttcagattcatgcacgcaaatgtaagcccgaccttcatttccattcgggcttttccaaacatctgtgtatatcggaaaccatgattctcctttgcacttccaaagattcgttctatggtttctttcctttgggaatataattctttcatacccacggtttggcggatctcctcacacatctccatgtaaggttcccatatgtggcgcataaccgtctttacatgatctttgctttgggtacattttgcaagataggcacagcttgcacagctacttccacagcttttgtactcccgatatccctcacggttggttgttcgataggtcagcacctgattgttgggacagatatagcagtcgtaatactcatcataaacgtactcgtatttcttgaagaaaccctcttttgtcagggggcgtttgtatggcagaagcggtttgactccttgatcgatcaaaagttttgctataccgggagttttatatcctgcatcgcctatcagcgtctctattccgatcccttttatcttgtcatataaggacttgaaggttctgctgtcatgattgttcccgggatgaacgctatagctgagaatccatccattcttatcacatgcggtctgtactgcataagcaaatacatgtttatgttctcctttgcggaaccatccgctttccggatcagaagtgcttgctttcactgtcttttcttctttgccgccggctccaccggatggtgtattgctgtcatcctctttttctttcagcggacgtttcccgtgtgcttcacggtcttcattgatttcctgtttcagcagatcttcaaaaaataatgcctcatcatgagcaatacgcttctgcatctttttattgtttgctctggcttttacatgggtggcatccacaaaaacttcagtagggtctaccagcttaaatttgtagcattcagaaaggatatgctcgaatatctgttcaaagaggtcggtgtctttaaagcgtctcgtatagttctttccaaaggttgaaaaatgcggcactttatccagcatatccaacccgaggaaccagcggtaggcgacatttacctcaatctcttttaccgtctggcgcatgcttttaatgccataaagatattggatgaaaggaatcttgatcagcatgacggggtccatactggggcgtccgttgtcctgactgtatttttcttctaccagttcataaatgaaggaccagtcgattgctttgtcgatgatccgcagcagatggttctgtggaaccatgtcatccatgcaaaacaactgaatctgttctctttttttatccgcattctgtgtcatcataagcatctcaccgcctgtatttgatacatctattataccaaaaaagagcctcaaagtcttgtaagtgctgacttttctggctcaatggcgaagaaaatcctaggcacttgtcctcggactttgtctacagtctgagtgggacgtgttctttctagaaagaacacgtcccactttaacccttttctaaaacatttctttgctcacagcgtctatttcttcggatgttgcctcgtacaccccttcgaaggtactaagcggcagcccctgggaggcgcccggaatgaagtataattttccgcattccctgcaggctctttgtacttcccgtctgacttcctcttttgtccatccgggatgatcgatgcttgcgctgtcaatccctcccataaaggagatctccggaccatatttctggatcagctccggaatattatttgacgtcataacaccctgccaaatatcaattcccatgtctatcatatatggcaccagtgtggcggcataagaatctgagtgatggacaataagttctacaccgttctcccgatagcagctgtatattttcttgtaggcaggaagatagaattcctcgaacatttccggagatatgaaggtggaaatctggctgccccagtcgtcgtgatggaagagaccgtccggtttcatgtatttgcagatttgctccgcatactgaatctcccagtctgttatatagtctatcagctcgtgcattgcctccggctcctcatagaaagccatcatgcagttctggatctctaagagataatggcactgttcaaatactcccggtgcgatgaaggccatagcgaatttttcctttcggtctacggattctgcgtgcctgattgccgcctcccactcttcttcggggtagacagcgggaggcgcttttacatagtctttccacgcagcaatgtctttacacacaatatgtgcctcatcgtgaatggggaatgctcccggcaagtccttgggccaggttttggtaacaccccatcctgttttcacatcaagctctcccggattgggatccggaaatttcagggtgaagggatcctctcttattatatcgaaggcctcatactggtttacaaaacgatctggttttcctccccgaatagtttcaagcaaattttctctttttgttaacatacacttccccctctctacatcttcagaaccgccttgattacatccccattatgggagtcggcaaatgctttattgatatccttaaaatcataaaattttatcaggcggtcaaaggggaaccggccttttttgtaatactctatcagctgaggaataaagagctttggaatagaatccccctctacaattccaataagggatttggcatcccccattaactcctgctgcacgttaatggtcagatcccccgttgcccccagaaccacgcaggtccccatgaaccgcacacttgccagggcctttcttacaaagtctcccacccctgtagtatctatgctgtagtgtgtgcctccgttggtaatcctcttaacctctgccacaatatcatcgcattctttccggttcactgtatgagtagcccccagctccaatgccaattccagactttttttattgccccccacggcaatgatcttgtcacatcccgctattttagcagccataatagcgctcatgcccactgtgccgcagccaaataccgctatgctggatccgaacgccggtttcagccggtttaaaaccgctcctgcccctgtctgtattccgcatcccaggggtcccagcagcgccagatcaatggtatcgtccgtaacctttatggtactgttctgatgtacgactgcataagtggcaaaggatgactggccgaaaaatgaagaaagctccacaccgttctgagacaggcgtctggtcccgtcggccataacacccccaaagttgatggcattaaagttttcacaggcatgctggtgagcggaaaggcaattttcacagtgtccgcagaagccaaaggaaaagcttaccctgtcacccttcctaaactcagtgacaccttcccccacatcctccacaataccgcagccctcatgccccagaacagccggaaggggaacgggaattccctggtgctgggccacctcatctgtatgacagaccccactggccactatttttaccaacaattcacccgcttttggtccggacagttccacttcttctatctggaaaggctggccggcttcatgtacaactgccgcttgtattttcatacgcaattacctcctggttcgttataatagatactctatgccgctttctcaattatatttagtatatattgcacaacacataaattccatttcccaaaaggacatatatactttaacatatgtccctttctgaaaagaacacccggacgaggagctttgcccgtgcacttataaagggcagtcccacgaacgctatctgggactgcccttacggccggtatccgttatacctttaattatctatattcttctttttataaaaatatccaaataatataactgcggctaccaaccagaccaggataactgcaaaagccagtactgtactgcccccaaaccttccctgtaccaaattataatatacctgaagcattgccccgagaggtgtgatccttgccagaaatgtcaaaaccgcacccgatgccatagccgggggaaccagaaaaagaagcataacagggatctgtagaacgctgcagctcatctgatccctgctgagcaggccgataagagcactaatcataatcacacagcaggacccaagcagagaggcaaaaatgtacacgggcatatgccccgttggctcccctgagatcaaaaagataaccacattccccagaaatgtgacgcacacagccaccaggattttggataaaaagaattccatagcgcttacattagacagaatcagtgttctcaaggtaaacttttccttctcctcagccacagaggtagatacaatcaacacgcctgacatactgcagttcataagcagccccagattcagaaggaataccgagacctcttctatagccaggttggggcccaccacatacttatacagcaatacaaatgctacgggcagaagcacactggcagaaatggccggattttttacaaaatccatcagatcctttttatacaacgctctaagctttctcatagatatactcattaaaattccctccctgtcagcagtaaaaatatttcctccaaattcggctcctgggaatgtacggtaagacagcgtccctgctccagcaattcacggatccgctccccgccttcccggtttttgggatatttcagtgtctcccgatccgtggtcagcacctctatctcgtccctggcatattccagcttcagttcccggggactccctcccgcaatcagctttccctgattcagaatcccgattctgctgcacagtttatctgcctcttccatattatgtgtagttaaaaagatagtagtcccctgctggttgaggtgccttagcatcttatgtatctcctggatcgtggcgggatccagaccgctggtaggctcgtctaaaaacaaaagctccggcttgtgcagaagagaagctgccagaaccgccctctgcttcatacccttggaacactttttcaacagagtcttcctctgatcatagagccgcacattctccagggtatccctcacactgttctttggtacgttgcgaagcgccgcaaaaaagttcaggttctcctctatggtcattctttcatataaaccgctggtatcagacaagataccgatgcgctcataatcctctctctccactttatcgatctcttttccaaggatccgaatctccccggactttttcagcagctgttttgtcagcagcttcatggtagtggtcttcccggctccgcttgggcctaaaaacccaaacacttcaccagacatcacctgaaagctgagatggtccagggaaaagctgcttccaaaatcaagacacacatcctccagatatatcatttccttcatcttgctgtcctccttgttctgttttgtgtccattatgccacagcacccgggaaatgcaataccatccgcttattcagcgcctttgccggaccaaaagaaacgaaaatctgacgaacggagccacagcagggacgaacggagacaaaaatcaccagtgaaatgtcgttttcatctcctctatccgccccttggatagtggaatctgactgcgctccttattgttcagaataagaacatagctattcttcgtccacttttcaaaccgctctgccttctgaatattcacaagataggatctgtggcatctgaaaaatcctgctttcttcaaagcctcctccagttcatacatgggcagctgtgtctgatacagagtccctctgacagacagataactgcatttattcatactctccacataatcaatatctctgggttcaaagagcaacgtactgtttcctgatttcgcgggaatcttcagtatctccagttcttcctccggggcctccgattcctctccgtcctgctccacctcgcagaatttaccatcctcaacgtaaaaggcagtaccgggcatcataagcgcatacctcagggaggaattgacagtaacaaactgcgcgcctgcctcccatcgctcttcaatccagcggaggatctttcccatggctccctcattcaagtttgtcagcggctccgcaagaaaatacagctttgcattttgcatactcacccgggcaagctgaatctttgtatattcccccggtctgagagacctgatcttcgccttacggatgtccctcaggtcaaaatcctccagtatgtcctccaccgatctcgtctctccgaataagctgtggaaaaatctgatatattccatgaccgtctgtcgttcgtatcctttgtcctgaaaggtaagaaatgccgtatcggccgcctcccagtgcgctcttatatattgaaatatatcctctcccatctcctggttgcattccaggtgaatactcccatgagcggggataccttccaggaattcaggaatagagtcatatattttagtgtccaatgtactgtgcctcctcctaacatatttgagaaaaattttactatattatgatggctttgtccatgtaatacaccaaaacaggcctgtaagtatcagccaaatgatacttacaggcctgtttccatctaacatccgtctgatccatccacctttgataccgaagaccggaacggacattgatgaaagctctcctcatacagaatacagcggttttttcccatattcttggcctggtacaatgccttgtccgccttgtcaaagagaaccctgtattctgtcccgtccctgggaaatactgcaattcccacgctgctgcttactttgtgctgtccctggacatctgcaaataaagaacagatatcctgcattctttctctggcatcttcaggtgaaaggatatgtctgagaagaatcacaaattcatcccctcctacccggccaatgatatcctctttgcggatattccgctttaggcacaaagatactgctgccagaactttgtcaccaacgctgtggccaaagacatcattgatatttttaaaattatcgatatccatcagacacacagccgttaattccgattccctcttcagtatctgacgtgttttctcttccagtgcgcggcggttcagcagccttgtaagagggtccgtggaagcctggatttttagtttttccgtttctgttttttgagcattcatgtgggtcagattctcaagtctcctttttaccaggcggggataaaaaggctcctgaagaatatcagaaaccccaagagagagcgcccgatccagcttatccagctctatatccttcataatcccaaccacaggaaccagctcagtaaacccagactgtctgattttttccatagcgtcccatccccctgcagcgtcttctgaaaagtccagcagaagagcagatatcccaagtccataagtatccagaaggtccagggcagcctgaccgcaatttgtttccagaacttcaaaagagacctggcatatggcacgcaggttttccattctatttcggttgttcgtagcaataatgattctgcttctttttctttcaactcccattttctataatcctgtctgcgcagaccagcctccccttgatccgcatgtattttaaaatactggtaataaatatactcgtaataattatacgataattattattattttacaacgatatttacaagtataatttacgatataacttagcaaggacggtgattatttggatatattaggaaaaatttcccaattacgggaagagcggcactggacagagtatcagctatctgtgaagtctggtctcccgcagtccaccatatcttcctggtatcgaaaggatatacttccctccgtatcgtccctggagaaaatatgcaacgcctttggcattaccctctctcagttcttttgggatggctgtgaatcagtaatactctcccctatgcagaaagaattgctgagacattggaacagattgaataaggaacagcaaacatcacttttaaacttactgtctacctttacgtaaatggtataaaaagagaacccggcacattcccactgtatctgccggattctctttttactatttactgccgcagcagctgtttatcgaattcagggttaaagaaataatagtttctctcatctagctttctcttcgtcttctcgagagcctcaccgaatctctggaagtgtactacttctctggctctcaggaacttaatgggatcccgcacctcaggattctgaactactcttaaaatattatcataagtggttctcgccttttgctcagctgccaggtcttcaaacaagtctgtaatagcatctcccttagactggaattcacaggcattaaaaggaattccccctgccgcctggggccaaagtccggaagtatgatcaatataataagcgtcaaagcccgctgttttggcatcttctatactcatatctttcgtcagctgatagataatagcactgacaatctccatatgggcaagctcctctgttcctatatctgtgagcaggcccgcaacctctctgcatggcatggtatatctctgggaaagatatctcatagaagccgccaattccccgtccggtccgccgaactggctgatgatcagctgggctgtcttcggacaggtttttgatattttgacaggatactgaagccttttttcataattccacattaaatatgccctccttcccaaggtgttggaccgtcaacccaggtaaaatgccgctggccggagtaattgcagaaatcctgagaggctccgtgagagtccacacagacacagtcaacggttaacggttcaaactgctgttcatactcctgcataagctgctttcttctatttttgctctgttcaaagagttccagagcctgctcatccaggggatgtgtatccagatagagggtgacatcattcattacaaagctgatatcattcaattcatttaaaagcgctgttctgtcaagcatggctttcacctccagtaatataaaatggcaggtccaaatcggcaaaaattgtgccttttttcagagctgttgaaggatcatagatctttccccagctctggaccggcacagatgccatggccaggatacaggtacactcctgctgaaaatcactgctttgggttccgtggcaggtacattccatatcgtattgctcctttcatttgtaaaataagaacaccgaggttcaattatagtatgtgtgagttgccgccgaattacgttagttcttaaattgtaattctgggagataaaggattccaattttaatgatttattttccacttgctggtgaacttttttatacttttttaataaatatgttgtttttataaaatttttctcaaaaagtgttaaatcggtaaaaaaaaagtcaagattggctattaccttttttattgtactatatgaaaataaatatatatattttctgtttatttagtaatctatccaaattctctcatatatcaattatactttagattattttctttataataagcagaaaacacaggaaaatccctcaaatatttattaccgaaaggagcagctatgaacgatatcagtatcagaatcaaagaactgatggaagaaatgagcccgcaatttatcgaaaccttccgtcatctgcacaagaaccctgagctcagtttccaggagtatgacactaccgagtacatccgcgccatactccgggaactggatattaagatactggacataggacttgaaaccggtgtcgtgggactgctggagggcaaagaacccggcccctgcattgcacttcgcgcagatatcgacggtcttcccatccaggaggagtcctcaagcagttatccctcagagcgccccggcaagatgcacgcctgcggccacgacactcataccgcctctcttttaggagcggcccgcctgctggcatctgtgagagagaacttaaaaggctcggtaaagtttttcttccagcctgcggaagaagtaaacctgggagcgaaaaagttggttgccctgggatgtatggagaacccccacgtcgacgctgtcttcggcatgcacaatgaacctcatgtcccctacggatgtgttgctgtaaaaaaaggaccccttatggcctctgtagacagaatcaatattaagattacgggcaagggcggccatggaggaatgcctcagaaaaatattgaccccattgttgtggcagccgccattatccagtccctccagactatcgtcagccgtaatgtcagtcccattgactcctgtgtggtatccatctgcaacgtaaaggccggtgagggtacagtaaataacgtaacgcctgaggaagtcagaatgtacggcaccgtaagaaactacagccaggatgttcagcactatgtggagcagagaatccgggatattgtggaacaggtatccgcagcttacggagccaaaggcgagctggaatacatatatgaactggcggtcactgataaccacgaacagttatttgatattgcaaaagatgccgtagaatccatcggcgcagaagtatttgatcctattcccgttacagggggagaagatttctccgaatatatgaaatatgcccccggttttctctattggctgggtgtaagaaatgaggaggaggactgtatctatccatggcacagcccccacttcaaggccgatgagcgggctatcgtaatcggagccggcacctatgccatggctgctgtaaaagccatggaaaaattctaatttctgcacaaaggaggatatatatgaataagttcaaagaaatcttttccagctggaagcttcttatcaccgtactggtgatcgttatgatatctgaaaaaataggcctgcttaaaattcctatcggatccggcagcattatgttcctgccccttctgtacgctatggctctggggctaatcctgtacctggcaaagcctgtaaagtgggtaaataaagagcagacctccatggctgataaatttatcgtaatcggtatctctgtatttatagccaaagtcggcgtccagagcggcgctgccattgaggccgtgatcaaagccggccccgccctgattctccaggagctgggaaacctgggaaccattctcgttgcgcttcccttcgcactgctcctgggattcaagcgcgaggcagttggtatgacacactctatcgccagagagcctaacgtgggatttatcgcatccaaatatggactggactcagccgaaggccgcggggttatgattatctatattgtaggtactttgatcggtacgatctttatgggggttatgtccagcgttctggcctcctttacccctctgcacccctttgccattgccatggcaaccggtgtgggaagcggaagtatgatggcagccgcctcagctccccttgtctccatgtttcctgatatggcaacagaaattacagcttacgccgcaaccagcaaccttctctccacagccgacggtatctatatgaccatgttcataggactgcctctgtgtaatttcctgtacagaaaactagaaccggtgctgggcaaaaacaggaaagtgaaaaccaactagacaaaggaggaacaaacgatggaaaaagcaaaaaaaggtctcaccttagatacatttttagaatactgtcttatcatgctactgatcacagccattgcttatatcgggaactggatctacagcgatttcggcctcatggagagccttcccgggatcctgattctccttgcaattgcctttgtgggctatacgctctctgagcttatcccctttaacattccttctgtggtgtatatcagtattgtgggcctgttggttgccatgcctgtcagccctttaagcgaaatggttgttgcctataccggaaaagtggaaatgcttcctcttgccactcctgtccttgcctttgccggcgtttccatggggaagagctgggcagaattcaagaaaatcggctggagaggcatcctggtggcagcacttgttatgatcggtacctttgtgggatccgcagtggtcgcacaggttatcttaagtatgacgggtatcatataatctccccttcatatatttttactggtttgaaagcagcggaaccctgtctcgggcttccgctgttttctatgcatcctaaggaagactttacaaacattttacatcctgttttttgccgctcctttataataagaattagatatgtaacatttcagcttatagaaaggaaaggagattctgtagcaatactacatccgctgcagagaccgtatatgaatagaaaaaatacagttcgatttataatagaaagcagtttctcttctttaaggccctcggagcagaaagccgggcaatatgttctggaccaggaggaggatattttggggctttccctggccgatgctgcccgcaacgcaggagtgagccagcctacggtaatacgttttgtaaaggcccttgggttttcaggctataaggaattccagtacgagctcataaaagaccgggccagaaaagaggaaaaagaagagcagactccggatgtccgggctatgtacggataccgggttactgcctccgattcagtacaggatgttcctggaagaataatcgccaccaccattcagagtctggaggataccctgaagtttatctccggggataccctaaggcatgccgtggatgccctggtcagcgcccgcagcatctccatcttcggcgtggagaactccctggcaaccgctaaggacctctgtaccaagctcttatatctggggcttccctgccattcctttgatgactattatcttcagagaattgctgccagcaacatgggcaaagaggatgttgccataggaatctcctattccggcagctcccgggatacggtagatgtgatgcgcactgcaagaaaaagcggagccaggacaataattatgacaaacttcaggaattctgtaattgaaaaatacgcagatctcctgctctgcacatctaatgaacagcttctgtatggggacgccatattttccagaaccacccagttagccctggtggatatgctctatctgggaattatagtaagcgattataaccgttttgccggcaagctggataaaagcagccggattatcagtgataaggcatataagtcctgaacagggggggcgggtattctgtagaaatactaccgaatatccgccccctgccgctttcttcttttacattctcttaacctaattttgaactgcatttcattgttattctccatccccattgctataatgaccatgttccagacgggaacgaaattcacagaatctctaacgggcatccataaatgcccgccagaacaagtacatagcttatgcaaagaaaggaagtagagatcatgctgcaattacaacatgtgaaaaaatcatatgacaaaacacctgtcttaaaagacatttccctggatatccgggacggagaaattgtatccatccttggtccctctggctgcggaaagactactctgctgaatctcatactgggaattacagatgccgacagcgggtccatcctgtttgatggaaaggatattacccgtgaacccatggaaaagagaggcttcaatattgtatttcaggactatgctctttttcccaatttgaatgtatatcagaacatcacttacgggctaagaaacaaaccggaaatttccacccgagaggaagtggacgaactggttgaactcctgggcctggaggaacatctgcgcaaacggatcgatcagctctccgggggacagaagcagagggttgccctggcccgcaccatggtgatgaagcccaagattctgcttctggatgaacctctgagtgccctggacggcgtcattaaggagtcaattaaggagcgtataaaaaccattgccaaggagtaccatctgaccacgattattgtcacccatgacccggaggaagccttaaccctttccgatcgggtgctgattgtaaatgaaggtatgatttcccagtacgataaaccctgtgaaatcatacataaacctaagaataattttgtaaaaaccttcatcctaaaccagctggaaatcaaacgaaataatatctattccttatttgaagaaaccgttgcggcaaacggaatggctttttaagggcggagaagaaaaatgaaacataaaaacaaagaaataaaagttatttttgctttcctcgcccttatgtttgctgtctttctggcactccccatggtgcgcctgctgttaaaatctttcttgggggacagcggattttcactggaaagctacctctctttatttgcatccagaggattcgggaaagctttgggaaacagctttcttgtggcttctgtcagcgccctgactaccacagccattgccttccttttggcctacaccattcattacaccaacgtatcaggacgggcgaaatccctgatacggggagctgcgctgcttcccatgcttcttccaaccataacctacggattttccataatttattcctttggaaaacagggacttctcacccgtttgtttggacggcagctctttgatatctatggttttaacgggctgctgctggggtatgtgatctatacactgcccatctcctttctgctgataaacaacaccatggggtatatcgataaaaaatacatgatcgtttcccgtattatgggggataacgggctttctgcctttatgatgaccattatccgccctcttttgggaacgctggcagcttcctttatccagtccttttttctgtgcttcaccgacttcgggattcccgcttccgtgggaggaaagtttcaggtcattgccggcgtactgtacaacgaaatgctggggagtgtgcctgactttaataacggggcagttgtcgccatggtgatgctgattccctctgtggccagcattttagtactgcagtatctggaacggtataatgtacgatacagtaagatttcggtcatagaactacataaaaacaaggccagggattgggtgtgcggcatcctcagcactctgattataaccggagtcctgtcagtctttgctgttatctttgtggttccctttgtctcagaatggccttatgaaatacgttttaccttagagcacgtgaccgctgtatttgcagacgacgccctgttcggtgtatgtaaaaactccctgtttaccgctattgtcacggccgttttcggtactctggctgcctacggcgccgctctggtcactgccagaagcaccgtaaataagaagcttaagaatattattgaggggattgctcttatcaccaacaccatccccggcatggtaatcggtctggcctttctgtttagcttctccggaactgctgttcagaacacatttttcattatcattgcatgcaacgttattcactttttctctaccccctatctgatgatgaaaaattctctcgccaagatgaatgcttcctgggaaacaacggctatgcttatgggggacaactgggtaaagacgattctccgggtagtcactcccaacgcggtgtccaccatcctggaggtattcagttactacttcgtaaatgcaatggtaaccatcagtgcagtcatctttatcgcaggggccaggactatggtgattacaacaaagattaaagaattacagtactacaataaatataatgaaatctttgtgctgtctctactgatcctctttaccaacctggccgcaaagtctctgtttcagtatctggccaaccggaaagaaaaaactgctgggtcaaaatccagaacagtgaaaatagcacagtgatttttaataattatgaaaatgatttattgacactgagaagtaaaaggaggagaatacattatgaaaaacacaaaaaaattactattgttaggtttagcggcatctctgggaatcagcacaatactaggcggatgcagtggcagttcagataaagataagattgtaatctactccaatgctgatgatgaagcgatcactgccatgaagcatgcgttggataacaacggatttaaggatcagtacatactgcagtccttcgggacttctgagctgggaggcaagcttctggctgagggctccaatattgaggctgacctggttactatgagcaccttctatttagaaagtgcccaggagcagaataagatgttcaaagacctggattttgatgttcaaacgttagacacgtatccttcttactgcgctcccattactgcacaggagggtgctgtcattatcaatacggaaatgatgaaagacaataatctgcctgccccggcctctataaaggacctggccaatccggaatataaagatatggtttctgtcacagatatcaattcttcctccacagcatggcttctgattcaggccctggtatctgagtacggagaagacggagccaaagatatactgaaggggatctataagaacgcaggggatcacatcgaagactccggttccgcacccctgaaaaaagtcagagccggagaaaccgccatcggtttcggactgcgccatcaggcggcagccgacaaggagtccggactgcctgtggattatatagatccggcagaggggaacttctctctgaccgagtcagctgcggttttagacaaaggagcagacagcaaagagactgccatggatatggcagagtgcatcattagaaatgcaagagaagagctgctgactgcctaccccatccctctctacgagggagaaaccgatggtgctgcagacaaatccggcaatcccaaggttttcagtgaaccattaaccgtagagctgcttaagcaccatcaggagctttctgacagctgcaaaccagaataaaggataactcctccgggaaaccggagctggaaaaatatatgttacaggagaagacaaaatgaaaaactacaaattactcacacccggtcctctgaccacaacagaaactgtgaaaaaggagatgctgtttgaccactgcacctgggatgatgactacaaacaaattacccaaagtatccgcagacagctcctctccctggcccatgtatccggggaggactacactgtagtgctcatgcagggcagcggcaccttcggcgttgaatccgtgctcaccagcgtgaccggtgaccatgaccgccttttaatcgcggcaaacggggcatacggggaacgtatggctgatattgcagcccatgccgggatccccttccttctatacagccaatcctacgataaagttccggatccggaggagatcggggtgctgctggaacagaacccggatattacccacgtggccatggtgcacagcgaaaccacttctggaattctcaatgatattgcctctgtagcaaaggtagtaaagggtgcggggaaaacttttatcgtggacgccatgagcagcttcggaggcgtggacattccggtaggagatctgggtattgattttctggtaagcagcgcaaacaaatgtattcagggtgttccgggattttcttttattatctgtaaccgggaaaagttaatagaaagcaaaggtaaggcaagaagtctttctctggatctctatgaccagtgggagactatggaaaaggacggcaagtggaggttcacatctcccacccatgtggttctggcattctctcaggcgctgaaggagctggaacaggaggggggaataccagcccgcagcagacggtatgaagagaataatcatctgctgattcagagaatgaagcagcttgggatcgagccctatatcgggaacggccatcagggccctatcattaccaccttcttttatccggagaatcacagcttctccttccaggaaatgtatcagtacataaaagaccgtggttacgccatctatcccgggaaagtaacagaagcggaaaccttccgtatcgggaatattggcgagatctataaagaagacattaaccgtctatgcgatattctggaatcatttttgaaggagaaaggcttatgaagacgtgtgaattggtaatttttgactgggcaggaaccaccgtagactatgggtgttttgcaccggttcaggcatttgtagaggtatttaagcatttcgggattgaccccactatggaagaagtgagaaaacctatgggaatgctgaagcgggaccatataaaaaccatgcttgccatgcccagaatccaggagctgtggcttcaaaaaaatgggacggcttctggggaatcggacatcgatgaaatgtacggactttttgaggaaaaacttatgagtattctctcagatttttcttccccaaaaccctatgtcttagaaacagttgcaaagctcagggagatgggaatttctattggttcaaccacaggttataccgatgaaatgatgtccattgtgacaaagaaagctgcccaactcgggtacgcgccggacgcctggttcagcccaaactctgtgaataatatgggacgaccctacccgtatatgatttaccgcaacatggagcagttccgggtacacgctgccgatcgtgtggtaaaggtgggggatactgtctctgatatcagagaaggtaaaaatgcaggtgtatacaccatagggatcattgagggaagctctgaaatagggctcacccaggaggaataccaaacacttcccctctcacaccgggcacctttgatacagaaggtgaaggcccgctatcttgaggcaggagctgacgcagtgattatgaatatgtccgggctgattcctctgctggagtcaatttctgagtaaaagccggtacatgtctgcagggacagggatgcaaatccctgtccctgttgcgttttctacctattatgtgctaaagttataagagcagcagattaagcactgcacctaagggaaaggaacttggtttatgattagaaaatttcaggatgttagtatgatacaaagcgtgctccatgaggctatgacaggcctttggattatagagctggaaaatgatctgccgccccgcatgtatgcggatcccacgatgctggagcttttaggcctggaagaggaaccctctccggaagaatgctactgcgcatggtatgataatatctcagaggactacagagccattgtggagcagggagtaaacgaaatcctgcttaagggaagggctgaggttcagtattgctggaagcatccacttctgggtgagatatttgtccgatgcggaggtgtcccggaccacaccttcaaaaatggtgtctgcctccagggatatcaccagaatattacggataccgttatgctgagaaaagaaaaggaacagctggaggaactgaatcaggaaattatcggctccctttacgacttgttctttgctacctaccgtatggatttaaacacctggaagattcagaccatccagtccacagaatgtacgcagcatctgcgggcggaaaatattcattattccgaatttttacagtgggtactgccgtttatccatccggacgaccgggatgctgcagaaaaagatttttccctcttacactttcagaagctgatccatgatggactggaccgcttcaccggagagtacagggccaggttcaaagaagagtaccgcttcatctcctgtacggtctattttggaaaaggagtgcctgctccgacctgggcgatcctggcacttcaggatatccacgagcaaaaactccgggaggctgacagccgaaaagccctgacggacgcctatgagatagcacaaaaggccaataatgccaagaatgatttcctgtccaaaatgtcccatgatatccgcacccccatcaatgccatagtcggcatgactactctggcaaatctgagagcagacgacagtacctatgtgagagaatgccttgacaaaatagctgtatccagtgagctgcttctctctctggtcaacgaagtcctggatatgagccggattgagagcggacattttgaactttcagcagaacccctgcaccttcccggtcttgtagattccgtactctctgtggtccggcctgccatagatgaaaaaatgcagcatctgagcgtaatatacaaggacattgctcacccggaagtcctgggcgaccgtctccggcttcagcagattttactgaatatcctgacaaatgccaataaatatacaccggaaggcgggtctgtaaccgtctgtctcacggaacggcctaccgcctccacgcagtttgcaggcttctgcatttctgtcagagacaccggaatcggcatgtctgaggactttctcccccatctgtttgagccttttgcccgggagtcagactccagaaccagcaagaaccccggtaccggactgggaatggcaattaccaaaagtctcctggagatgatgagcggctctatagaggtggaaagctgtccctcaaaggggagctgttttaccattacctttgatcttttattgccaagtaagcgcaagaacacttcctcctgcgagaacggtccggaagagcccccggatatcagtgaactgcatctggatgggcaccgcatattgctggcagaagataatgaactgaatatggagattgccaaagagcttctggaattatcgggagctgcggtggaaacggcctgtaacggtgaacaagcttttactatgtttctgaattctccctcacaatattacgatattatttttatggacatccaaatgcctgtgatgaatggttatgagtcctccaaagccatacgcagcctgtcacggccggatgccgggcagatacctatcatagccctgactgccaatgcctttattgacgacattattctggcccgaaatgccggtatgaatgaacatgtcagcaagccggtacagctggagcagctggccagagtgctcaacagttatctttaaagtcccgggattaccctccggcgcctgaccatctgtcctttaccttgcagaacaatacccctactgcagtgctgatcagggtagccacaatggccgggcctacgattcctgtaggatttacacttccgtactggctgcggtaggctatgatattgaccggaatcagctgcagggatgagatgttgataattaagaaggtgcacatctcattgctggcagttcccctggctgctgccctcacccgcttttccggccggggggattctctgcgttcctcctccagtttggcgagctcatccatggctttgagacctgcaggtgtagctgcccagcccagtcccagaaagttagctatcatgttggcggagatatactccatgcacttgtgcccctcaggaattcttggaaataggaaacgtaaaacaggacgcattttccgggtcatcccgtcaatgagtcctgatttttttgcaatttccatgattcccacccacagcgccataattccggccatggtgatacacagagtaaccgcttcctttgcagaggaaagagcggcgtccgttacttcggccattctcccggtcatcatgccgtaggtaatcccaataagtatcatggctccccataaaatatttaacataggccttctcctcatgttttttatactatatgaggacaggtaatgaattattcgttatttatgaattcagggcgtccagcccctcatcatctgtactgatacgtatgacacggcttacatcatatacaaaaatctttcccgcgccggtctcactggtcttcagcaccttttttgtcacatctatgacctcgtctaccttatccccggggacaatcacctctaccttaatttttggcagaagatccacttccactttgtcatcgctgtaataccgaacagtacctccctgaaggccatttccgtccactctggttaccgtcattcctgaaagccctacttccttaagcgcccttctcagatccgtcaatttctccggattaaatattatcactacattactgatctgtcccatgtgtttcctccttgcctttggctactcacaatttaacagttcctgataaatctctctcttgctcactccccgatccttggccaccagcttcatcgcctccttacgtgtatgcccccgggtttcatacagttccatatgctctttcagaggcatacggctccattcctcctgggactcctgctccatctcccggcggcttctgccctccagaacaataacacattcgcccctgggctccgttgtatggtaatactccacagctccttgcagagtcgcagagtatgctgtttcgtgctttttcgtcaattcccggcagatagtaaccttccggtcccccaccgcctctaaaagctcctccagggtacgcaccagtctgtggggtgcctcatacagaatacacgtccttgtctccgtcttcagctcctccagcacagcctgcttctcctttttatccccgggaagaaaagcctcaaaagcaaatcttctggtgccaaggccagaaagggtaagcgccgtaatacaggcacaggccccgggcagagaagtaacctctattcccgcctcatagcacatagccaccagctcctcgcccggatcggatatccccggtgttcccgcgtcagtaatcaaggccacattaatcccctgctccatctggctaatcaggtagcggcccttgtcaatcttattatattcatgatagcttgtcattggggtctgaatctcaaaatgattcaacagttttacactgtttctggtatcctccgccgctatcaaatccacttcctttaaagtacgcaggacccgaagcgtaatatcctccagattccctattggtgtggcacataggtatagcttgcctttcataaatactctccttaaaagggacagggcagttccattttgggacaccccttccccattctgggacgtgttctttttaaaaagaacacgtcccactttcataaatttccatcgtttgcctggtatacacccccggcttttcataaataatcagaggcggctccacctttatcctggaattccccctcaacaccccttctatcagcaccagattgggttccttgtccagatatggatgcaccagctgcatccgcttgggctcaaggtggtatttcatcattgtacccattatctcagccagccggaacgggcggtgtaccatatagaatctgcctttgcttttcagcattttagctgcctgtccaaccacatcctccagggtacagagcatttcatgtctggcaatggtcttggccgtattagcattctgcagtccatgggagtggatcatatacgggggattactggtcactacatcaaaagaggccgccccaaatatggtcgcggcctctttgatatctccggtaacaatagaaattgtgtcctccaaatggttgtacgccacgcttcgccgcgccagtcgggcgctctcctcctgaatctccagtccggtataatgggctccctgggtgtgggcctttagcaatatgggtataatcccattgccgcagcccagatccagcgccttttccccctgcctcacctttgcaaaccaggaaagcagtaccgcatcaataccgaaacagaatcttccggggtcctgtatgattttgtaaccattttgaaggtcatctaaacgttctccatctaataacgctgctgtcatccagctcgttccttcctgtctgatctatttttccaattcttccagagcttttaattcttcctctgaaatcttaaccttcttatgcttgggtttaaacttcagttcttcaaccttatactcccgaatctctttttcatcattcacatccacaatcaccttcaccagctgacgcaatacactgacactctgaacctcgccccggagtccctccggtgtagttaccgtgtccccggtgcccggaagtctgcggttcagctcctcataggtctcctgctcatttttcaggcagcacataagtcttccgcataccccggatatctttgtgggattcagggataaattctgttccttcgccatcttgatggagaccggcgcaaattctgagagatacgtatggcagcacagcgcccggccgcagatcccaatcccccccagtatcttggtctcatctctgactccaatctggcgtagctcgattcttgtcttaaagacagccgccagatcttttaccagctccctgaagtcaatccttccatccgctgtaaaatagaacagtaccttattattgtcaaaggtatactctacatctatcagcttcatctccaggttatgtgcctgaatctttttcagacaaatctggtaagcttccttctctttttttctgttcttctcctctttctccgtatccttttgggtagccacacggatcacttccttcagaggctggattactttgctgtcctccacatctctgggagaaagcacgaccgaaccgtactctacacctctcgcggtctccacaattacatggtctcccgcttttatgtcaaatcctttggggtcaaaataatatatcttccccacattccgaaaacgaactcctattactcttgtcatgtttaattctccctgatggtaaggaacagcagctccataaccagttcaaagtttacattggcattcagccgcaccttagcagtctcaacggcattgataattgtctcaagaccttcataagaactttttctggcccgttccttaatataattaatctcctggcggaacaccaggctgtctacctcccgggtagctttaaataaaagtacatccctaaaccacagcaaaaacaaatccagatattcatagatcgtattcttttcttgggtaagagacttaatggtgtcaatcagatcattgagctccatctcttccgcatgcctgagaatcttaagggcagactctgtcatctcattgaactcctccgaggaggcaatctgctctgcctttcccacattcccctgggcaaaagaaacacacatatccgcctgataatccggaatatgaagccgttccattaggtaagtcttaataagattatcccctaccgccttgagattaagcacaacacagcgggacaaaatagttggcaggagagcactgacattattcaccagcagcattaccaccccataggacggcggctcttctattgttttaagaagagcattctgtgcctgagccgtcagcttttccgcatcattaataatgtatatcttatagggactggcatacggcttaatctgaatatccccgattacctgttcacgtatatcttctatactaattgtattcggcttctcgtgagttacattaatgatgtcaggctgatttttgctgagtgccttcttacaggaagcgcattccagacaaggctctattcctctcttttcacactgtaatgtcatggcaaataaattagccagaagctttttcccggatcctgtctccccggcaaaaatgtaagaatgagataccttattcatagccaccgcattctgtaaatgccggataatctcttcgtgccctaaaacctcttcaaacccttgcatataactcacctctatccttcgcagtttaaatccttttggatcccggacgctgtatgtccgttgtagccattatagcataaattgttttcaatatacagacttaatctcacaactcaccgcaattcatacaaatactctctgatttcctccaggcagtcctctaatacctcattgcggaatctttttccaatacctgctttctggatattctcctcagaaaagtcctccgcatctgccagaaagcgcctgcagagttccccgtacctgggttcctcctgcttttcttcccgctttatagcccttttcaggcgctctccatcctctacttctatataaatgggacacataaccccttctccgaaatactctctcatcctattataggactccagagtacctatccccagatagctgctgctgtccaaatcaacctgcccgtcatctgcggtaaaataactccagatcccatggactgtccggtaatccctaagctcaataatcttaccttctctcttccactcctccagcctctccggtgtcacaaagtgatattctcttccctcctgctcccccatgcggatcggtcttgtggtatacaatacaataggccttagcctaagcacctcatcctccagcagcctttcatatattgtatccttccctgaggaactctttcccataatgtaaaaaatctttcccatctctgctccctgccatcctcttagatatctgtaactctactggcaaaccacttgtatcctctggtttgtataatcagcgggcccctggagatcaagccccatattctgatactcccgcacctcatctatcagtctctctgtaatcatctccccgggaaccagcagcggtatgccgggagggtacaagtacaggtattcccctgaaattcttccaggactctcccataatactaccggtttcctatcccgttccagggcatccgcaatggtcagcctctgctctccgtaattccagtacccgcagtatccacatccatgttcagaatcatccgccttatccacattttgatcaatttcctccaatgctgtggataaccgctcataacccagagcagtatccataatgcttgtcattcccagcacataatccctggcagccatctccataggcagatgatacttatctaataaaatagaatataattgcgctcccgtcaagcggcagcctttggtagatattagaagctttgaagggtccatggcataaattccgtgtgtcccctcaagactgcgaggaaccagcttcaaattttccaaagattccagacgcttccggtgtactttcaaaagccccgcatactcttcaaacagccgctctccatcatctgttaccaggcccagtccatactctatgcttgccatcaatacataggaaggactgctggtctgataaattcccagaaaccgttccaacgcttccctggggactctttggcttcccaaatgtaccagtgcagtctgagtaagacagggcatggtcttgtgcaggctctgtaccgtcaaatctgccccgcaggccagggccggttccggaaagtagggatgaaatcccaggtgtgccccatgcgcctcatctaccagaagcggtattttgtatctgtggacaatctcactgatcccccgaatatcagatactactccgtcatacgtaggtgaggtaaggatcacagcctgagtcccgggattggccgccagcttctcctctacctcccggcaggtaatccccccattcaatccgtatcggtgttccggctccgagtccaggtagaccgtttggagtccccgcagataagcggcatggtacacggatttgtggctgttgcgggccataagaagggttcctcccggggtagtacaggcggagatcccactcagaatcccgccagaacttccatttacgcagtaataggttttctctgctccatagagacacgccgcccgttcctgggcatcctttaagattccctcagggtgatggagattgtcaaatccttcaatctccgtgatgtcgatagaaaaaggactactaaaagtccccttccctgcgcgcctcttatggccgggcatgtgaaacgggtagtaatccttagtactgtatgcgttcagtaatccgtctaatcttttcatatgctatgcttccagttctcttataccttaaatcggtagcctacgccccagatggtttcaatatactgaggcttggctgtattatactcaatcttctcacgaattttcttgatgtgcaccgttacggtagcaatatcaccgatagactccatgtcccatatctctttaaaaagttcatccttcgtaaatacccggttgggattctgtgccagaaaggtaagcagatcaaactccttggtagtaaagttcttttcttctccatttacccagactcttctggctgtcttatcaatctttagaccccgtatctcaataatgtcgttttcctggacccctgttccaatcagcctttcatacctggcaaggtgggcttttactctggctaccagctcgctggggctgaaaggttttgtcatatagtcatccgctccaagtccaaggcccctgatcttatcgatatcatcttttttagcggagaccataataataggcgtatttttctgtgcccggatctccctgcagatctcaaatccatccagctcgggaagcattagatccagtataaacagatcataatctccctccagggattttttcagtcccacatctcccctgtgctcgatttccacctggaagccgctgagttccaggtaatccttctccagatccgcaattgcctcttcatcttcgattatcaatatcttactcattcactggtacctcctgatattttctaaggacaaagtacatcactgtcccaatattttccttgcttgttgcccacactttacctccgtggtcctcaatgatcttcttaacaatagaaagaccaataccgcttcctccttttgatgaatttctggaagcatctgtccggtaaaaccgatcaaaaatattggacaaatcctttgctgcgattcctttgccgttatcctcgatctcaacctgaatgaaatcgccgacatctttcacccgaaggttgatgaatcccttagacttattcatatatttaagagaattccctacgacattattaattacccgcttcatctgctctgcatcagcaatcactaccacatcctgatccacataattgtaatatcccagttcaactcccttggattccagctccagtcccagctcctccgcacagtcatcaaagtaatctgtcacatggatcttgctgaacgtatagggaatgcggttggtgtcaatcttagaataaaaagtcagttcattgatcagcctgtccatatcattggccttgctgtagattgtcctgatatacttgttcatcttctccggggtatccgcaaccccatccataattccctccacatatcccttaatggcagtgataggagtcttcaaatcatgggagatattgctgatcagttctttattgtccttgtcaaactgtaccttttcctccgcggattccttcagccgctgcctcatctcctcaaagtcactgcacaggtcgcttatctcatccacgccttccccttcaatggtaaagtccagattcccttctttgatattctgtgtagccacctttaatttattcaggggagtgatcactccctggtatatccacagtgtaagtccgagactggtaataaacagaatcagaaccaccactcccagcatattcttcatcagagactgcacctgaggaatcgtctcaactgcactggtcacaataaaggcactcccgtcatccccgttgtccagggtaaagtcaacctgcttcaccagtgcctgcagtgtactccccaggtaaatcccactgtccgatccagcccggaaatcaccagatttagggagactctccagaagttccgactgatcccctttggctccgcaataaataatattgccatccatccggacaataagaaaagagtatttcgttgacagctctgtattgatagaatccagatactgcacatcctcaaaagaatccggttgattcttcgcctgctgctgcagggagtcaaaagttttctttgtcatactgctcagcatctgcagagagttagataaattctcatatgtgggattctcaataccatattgcttctcaatgttcttaagcatataatggctgaacccatacagacaggccccggtgaataccagaggaactaaaataatcacaaaaaaagaaataataatccgtgtttttagtttcatgattttatcctctctaaagagcctaaaagctcactttattgtataagtatagcacattcatagagggttttcatctaaacaaagtcctccaaatctaaactttctattaaaaaagccaaaaagggggacgtgttctttctaaaaagaacacgtcccaaaatcagaccggcctgtccctaattcactcagccctgtccccttttaactataagtatttcttcaaaacctctgtcttatccagtttttcccacggaagatccaaatcgtttcttccgaaatgtccgtatgctgctgtctgtttgtagataggtctccgaagatccagcattttgataattcctgcaggacggagatcaaaattttcacggataatttctaccagttttgtatcctccagtttcccggttccaaaggtatctaccattacagaagtgggatgggcaacccctatggcataggacagctgaatctcacatttttttgccagaccggcagctacaatatttttggccacgtagcgggctgcataagccgcagagcgatccaccttggtacagtctttcccggaaaatgcgccgccgccgtgacgtgcatatccgccgtaagtgtctacaataatcttacgtcccgttaatccgctgtctccgtgaggccccccgatgacgaatcttcctgttggattgataaagaacttcgtgttttcatccaccatgttttccggaataatgggggcaaatacgtatttcttgatatcttcgtggatctgttcctgagtgacgtccggatcatgctgggtggacaataccacagcgtccagccggctgggaacaccgtctttgtcatattccactgtcacctgggttttaccgtccggccttaagtacgtgagcgtgccgtcttttctcacctttgtcagctgaagcgccaatttatgggccagcgcaataggatatggcatatattcctcagtctcatcactggcatatccgaacatcatcccctgatctccggcaccgatggcatcaatttctgcctcagacattgtattttcttttgcctccagagccttgtctacccccatagcaatgtctgtagactgttcgtcaatggccgtaaccacaccgcaggtatccgcgtcgaatccatattttcctctggtatacccgatctcacgtacggtatcccgcacaattttctgtatatctacatacgccttagtggtaatctctcccatcaccattaccagccccgttgttgtgcacgtctcacaggctacccgactcatgggatcctgggcaagcagtgcatccagaatggcgtctgagatttggtcgcacatcttatccggatggccttcagttacagattcggaagtaaataataatttttccatacagcatctcctttgttcttgtcttatattttctcacttggtccgctttcaccgaagtactgttttcgttgccttatatgataaagtaagaaagattgcacggaagcgcaatctccgcctgcggcgggctgtcacagacagcatcttcctatccgccgcagtgtgatcccccggaggtttttttattacatagggaacgaagtttcctatgtaataaaaaaggcccacaacagtggacctcttatctcgtctgataaggaaaccctcttattgttcgaattactcgctcaggttggcaccttccgctgtgggggttgccgtgacttcacagatcctttgtatctccatcactctgaataagagaaaatataattattaaattgttaaccacatatacaatagctctttttttatcagccgtcaagtagaaaattatcccacccttaatttaaacttctggatctctttctcatcggcgaccttctcaatctcagcgcccagattccttaatttttcctcaaaatgctcgtaaccgcgctgaatatatacgatatcatccacaattgtaacgccttccgcagccagcccagcgatcactagggctgcacctgcacgaagatccggagcactgactcttgcccctgtgagcttgttcaccccgtcaattatggcactgtttccttccaccttaacatcagcccccatgcgggaaagctcgtctgcatatttaaaacgattctcaaaaatactctctgtcactatgcttgtaccctccgccagagaaagggcaacagcaatctgcggctgcatatccgtgggatatccgggatagggaagtgttttcacgtgggtacgtctcagacgtttagacgccacaactcttaccgcatcgtcaaattcctctacctcacatccgatttccaccagctttgcagtggtagcctccagatgcttagggattacattcttaaccataatatcccctttggtggccgctgccgcaaacataaaggtcccggcttctatctgatcgggtataatagaataattggtgctgtgaagcttatccacacccttgatgcggatcacatccgtacctgctcccttgatattagctcccatgctgttcaggaaattggccacatcaaccacatggggctccctagcagcattctcaataatggtgtttcccacagccatagaagcagccatcataatgttaatggtcgcaccaacagagaccatatccaaaaagatatggctgccgtgcagttcttccgctctggccacaattgctccgtgcatgatatcaacagatgcacccattgcacgaaatcctttgagatgctgatcgatcggcctgctgccgatattgcacccgccgggcagaggtacctccgcattcttatatttccctaataaagctcccagtaaataataggaagcgcggatcttcttgataaactcatattccacgctcacatcaccgattgtggaaccattgatcttcacaacgcttgggcttattttctctaccctggcgccaatctgttctatcgcctctagcaatacatgtatgtcacgtacatccggtaaattctcaacgcaaactgtctcatctgtcataattgccgcagcaagtattgccaatgccgcattctttgctccaccgatctcaacctcacccaccagtggattaccgcccttgatcacatattgttccatatattagcacctcgatatatttttacttatactcccagttatgaacaacctcaagaagtataactctgtctttttatttttaacgtatctgtctgttattatctatgtattaacacggtggcaataagtttcttacactccatattctaccgtgattacttatcatattataacagtcttaaacatttgtaaataaaaattaaagatttcttgaagatttgttcatattatcttcacacttttctgctatttatcgattttttccaaaattttctgcaaagtaccctctacatccaaatttttctcattaatcgttaaatctgcatatttttcatagagcggcacccgctcgtcatataatccccttaagtcttgtccctctttcaggaccacaccccgccctttcaggttccccaacctgtttttcagggcgccgaaggccagttccagatagataactgtgcctatctcctttaagtgcctcatggcttcccggcagtaaacgacactgcctcctgtggcaatgacagcccgctcagcctgcaaagatgcgtttacccggttctctatgttaagaaatcccgcttctccttcttcctctattatctccctcagcagacgattctcctgctgctgaatcactaagtccgcatctataaactggtatcccagaacctttgccagaattacacccactgtgctctttcccacgcctggcataccaatcaaaataatattgttcatactttcatccttttgcatattatcctatttattttaccatagggttcctcttttcgcaaatcatttcatcggcgttttttctttgcacctttcttcttccgcacactgtatccgaacgtacccagcttctttcccagcgagtagtattctccgtgggaatagacaatgggcctggacagggaaagatcaaacttgcccttctcgtccatataggattcatccacatgtaccgccaaaaccctcgccgtaaatagtgtatggcttccgtacgccatctcatcctccactctgcattcaatggatacgggggattccccgatcattggcgcccttacgtgtgccgccggctcctttgtcaggtgcagatccccaaatttgtccacatctctcccggaacggactccacagtagtctgtcgcccaggccagcttctctgttgtcagattaataacgaattcccccgtcttccgtatcaaatcataggaatacctatccggccggacagagatcgaaaccatgggcggattcgtacaaatggtgcctgcccaggcaatggttataatattatctctgccctcaccgtccgtcacagagaccatcactgccggaaggggatacagcatattccccggcttccactcggtttttcccatcttaactctcccccttcccgattaaccattctgctgaattgtgctcataaaagacggaatcagctgtttctttctggatacgaccccagtgagcaggtaagaaccgtctctggtgcatgccgcccccggaaaagcttcctctatcaatttattactattctctccgtagcagagaagttcagaggattcccccataatatccgtaagcataaaaaacaccatggaaatgccgtttttgccgcattcatttttcataaatgggatcatccgggcttttacttcctggagctcctctgtactcatggaactaatctgccctacgccaaacgcgtcctcttccacaataaactttttaaaatcctggtaaaatatttcctccggtgatttccctgtcagattgcttcccgcctgaaacatctcagcggcaaatttctcaatatctatcccggcaatctgtgccagtgctcccgccgccatcttgtctgcaaacgtacaggtaggggaacggaacatcagcgtatctgatatgatggcggcacagagaagtccggcaatggaaggggtaatctccagggctttctccgagtatatctgatacataatagttgccgtgcagcccacaggctgattcctgaaaaaaatcggctgtattgtctcaaggcttcccagtctgtgatgatctacaatctccagtatgtcggctgcttccacattatctaccgcctgggacttttcattatggtctacaaggatcagctgctttttcttcatgcccagcaggtttctgcgggaaaccgtacccacatacttaccgtgcttattgatcacagggaaagctctgtgccggttggtagccataacctcttttatattatctgtaaagtcatctgtctgaaaggtgatcagattctccgtcttcataagggagcgcagaggaatgctctggttgatcagccttgccactgtgaaggtatccaaaggtgtctttataattacaatctgcttctcttccgcgctttttcggatgtcctcatcggcctcccctcccacgcagataatcatacagctcacattatgctgcagggcgcacagctgatcctctctgcgatctcccagaatcacaaggtcattttcctccagatacgtgcccatcttatccggataggcagcccccacaaagacacgtcccctggtaaaacaggcatgctcatttccaacaattatttccccctccacggttttggcaatgctctgatacttcgttctggcacgggataaaaagaaattgtcgtgagcatccatataggacttcgcaatgtcccctgtagttatcaggccctccagcctgccgtcctcctttgtaataggaagagtcactgcattattctctttcataatctcccaggcgtctttgatggaaatatttttatctactccgggagtttcccgtatctccatatcctttacctgagtccctacatccgctatatatcctggggtctctacatggaaacgttttaaaatatattcggtctcctcgttgagctgccctgccctcttggcaacatatcttgatttattgtctgtacggtttttaatgtctgcataggcaatcgctgagcagatagagtccgtatccggattcttatgtccaatcacataaattctccgctgttttatcattctaattatctcctatttttagtgcaaattcgcaacagtcatcctgttttgacttatagtaacatattcattctccaaaagctacggggaaattgtaaattatattttatactttccccacattatgatataattatcagaaaagcgtcagcataaaataaggaggaacactatgtctgaagaaatgaaaacaccggaagaaatgactgcaccccaaaaccaggaatctatggaggattacacccaggagttagaagcctcttttaaaaaaattgaagagggggatatcattaccggcacggttatctccatcagtgacacagaggtcactctcgacctccgctattacgcagagggaattattaaaaatgaagacttcagccgtatgcctggatattctgtaaaagagcacgtttccgtaggggatgaagtgtccgccacagtagtcaagacagacgacggacgcggcaatattctcttatcccgggtagaagccaacgatactctggcatggcagaagcttcaggagctcaaagacagcaaaaccatacttgatgtaactgtgaaaggcgttgtaaatgcaggagttatcgcctacgtggaagatgtgagaggatttatcccggcttccaagctttccctgagttatgtggagaatctggaagactatctgaacaagcccatccaggtacgagtatttgaccttgacaaggaaaaaaaccgtctgatcctttctgccagagagatactccgcgagaaggctgaagaggaaagaaaggccagaatctctaatgtggcagtaggtctggtgacagaaggtgtggtggaaagcattcagccctacggcgcttttgtcaaccttgggaatggactgtccggcctggtgcatatatcacaaatcagcgagaaaaggattaagaccccctctgaatgcctcagcgtgggagatcaggtaaaggtgaaagtaattgccattaaagacggcaagctgagtctcagcatgaaagcgctgaacgatgtagccgcaaaagaaattgaagaggaaacctttgaacttcccaaatcggaagaagttaccacaaatctggggtctttatttaaaaacctgaaattataaggtgtttagaagacttccttaagacttaatacgaggtgagataggagaactattcatgtttaagaaaatctttaaccggatctttatagatgggttaagcggtatggcatcaggcctctttgccactctgataatcggcacaatcgttcagcagctgggaaatctgataggcggaaatataggttctgtcctgtatcagtttggaaagatggcagctgccatgaccagcgccggcattggcgtgggcgtagcctgccgtttcaaggagagtcccttggtggtactctccgcggctactgcaggtatggtgggcggatttgccggaaagatcctgtccggggctgtatttgccgctgacggttctgtggttctggccggccccggggagcccctgggggcatttgtcgccgcctatgtagccattgagctgggacacatcgtatccggccgcacaaaggtggatattctggttacacctctggtttctattgtatccggatctgcagtaggacttttggtaggcccccccatcagtgctatgatgacaaagctgggcgccctgataaactggggtacagaacagcagcctctgctcatgggcattatagtatctgtgctgatgggtatgattttgaccctgccaatcagctccgctgctcttggggttatccttaatctttctggccttgccgccggagccgccaccattggctgctgctgtaatatgattggttttgccgtggcaagctttcaggaaaatggaatctcaggccttatcgcacagggaatcggaacctctatgcttcaggttcccaatattgtgcgtaagccggtcatctggctgccggcgattgtatccagtgccattctgggtcctgtaggtaccatgctatttaagatgacaagcaatgcaaccggctccggaatgggtacggcaggtcttgtaggacagattatgacctggcaggtaatggtgccccaggagggagccaccgtagttctggtcaagatccttctcatacactttgtcctgcccggccttctcgcctatggggtttcccgttccatgagaaaagccggatggattaagcccggagatatgaaactggaagtatagcgaacagtgtttttagaatgggggatgacacagatatgaaaaaagatattggatatgttcacatttactgcggagacggaaaagggaagaccacaaccggaatgggactctgcgtcagggcggccggatacggataccgggtgcttctgtaccagtttatgaaaaacaataaaaccagcgaacgcagtgttctgaaagaggttcccaatattaccctgatggaaggtctggagcaggaaaaattcagttttcagatgtccaaggaagaaaaagcggaacggacactcttttatgaagagcagtttcgtaagatcacccaaaaggcacgggaagaggattatgatgtgcttttcctggacgagttaatctataccatccgcgcaggactttttcatgaggaactactcctggattttctgaaacacaagccggaaaaactggaggttattcttacagggcaaggacccagccaggcgctgatagacgcggcagactatgtctctgagatcaaaaaaattaagcatcccttcgaccagggactccccgccagaaagggaatagaatcctaaacattctattaatttttgttaagattttgccaaagtcacccggtctatggtataataggaaaaagccattctttaacgcattaccgtgctggtgatattttccagggcaggagagcgtgagaatggacgatgaaactaaagaggatgtgaggcccatgcaaagtaagactcttcccatccgcaactttgaagatgtggacagctgggagaccctgatgtttttatacaacgcagccctgaaagagataggcacaaagattgatattctgaatgacgaattccagcatatccatcggtacaaccctatagaacacgtaaaatcccggattaaaaaaccggagagtattgtaaaaaagctgaaaaaaaacggctatgagtccagtatagaaaatatggtaaaatacgtaaacgacattgccggtatccgtattacctgctcctttacctcggacatctaccgtattgcagatatgattgccaagcaaagtgatctaaagattctggctttaaaagactacatgaagcatccaaaggaaagcggttatcaaagctaccacatgcttgttacagtcccaatctttttatctgacagtgttgtggacacaaaggtagagattcagatccgcacagttgcccaggacttctgggccagtttagagcataagatctactacaaattcgaaggaaacgccccggattttatcagcgaagagctgaaggaatgcgctaagatcgttgcacagctggatgccaaaatgctgtccctcaatgaaagcattaaaaaagtggaggccaatgcctcgggggactatacttatcaggacgaaaaaaacaaacaatctcttgcataatggtatgaaaacagccggcggaatatcccgccggctgtttatttatcttgtttttgtccacacaccggagccgtttacatagtatttcccaatccaggtatttgcagccattgctccgttgtcatacagatagtaataatttcctcctgtatatacccagcctgtctgcatagctccgcttccgctgcagtaataccaggtacttccgtctttcacccagcctgttaccatagctccgctgctctttaaatagtaccaagtagttccatccagcagccagcctgtggccatagccccgctgttcttcagataataccaggtagttccgctcttaatccagccggtctgcatagctccgcttccattgcagtaataccaggtgtttcctatcttaatccagcctgtggccatgcttccgtttgcattcagatagtaccaggtagttccatccagcagccagcctgtggccatagcaccgctgtctttcagataataccaggttccgctctctttcagccatccggtctgcatgattccgcttccgttgcagtaataccaggcgccccctgccattacccacccggttgccatgcttccatctccattcagataataccagcagcttctgtccttcagccatcccgtcatcatagttccatcttctctgaggtaataccagctgccgcggtcatttgcccagcctgtagccatagttccgtcgtttttcaggaaataacggttctttccgtcctgaagccagccggtctgtctgtagccattagtgtcaaaatgataccacttgccatcaatctgtttccagcagtcctgtggccatgtgtcgtctccgttgtcataccaccagcggtcaccgctctgtacccattcaggcggagcgataattcttacctggaactgtgcttcagcgccctcaaagcttattgttacagtctgaagtccacggacagaagaatcaaatccactgactttatatcccattactttctggctgcggccgtcagaaaaatctgctgtcaccaccatgcctgttttgtcaaagctgtcacccatctggtatgctgttttataatcaccactcagagtaattccagtaacagagggtgtctcatcgtcagcatcgttaaatggagtaactgtgatattttcaaggaatactctggagtttcccccttcaagtctaacggtattggttgctcccggagtcatatcatttactgtgaactcagagtgaccagtgaagaaggatttgccccctgtagccaatgtatttacataagaataatctacgccattgacaatcagctttaattttcctttgtcaggagttgaaaaattaataccgatggttgctcttccgcctacctcgccgccgtctacattattaaatacaactgcgctgccgcttttgtgcaggtttgtaaccacattgcctgcggatgctttgtcatttgccagaagtgccgcatccccttccagctctgcttcatccgcctgataagttaccatatcctcggaaggctctactcttgggccgacaggctctacactgtccagagtctgctcaaccataaggatctttccgttctcgtcaaactccagcttgtccacacacacggaacgaagattcccggtacccgagattgctttattatgatagaacagataccattctcccttgtactccactaccgaaccgtgagaagtgtcacagccggtggaatccaggaatacatcctgatactcccatgggccaagaggactgtcgctggtagcatatttcatacggtttccgtttccgccgtggttatcaggatatgtaagataataaattccgtttctcttaaagatccaggtaccctcatggaaatcatccagtccctccatgggaacaggctcagatttaatggatatcatatcatcatttaactcggcgcctacgcatttgccgccgccgcccaggtaaatatatgcctttccatcatcatccatgaatacacagggatcgatcatagcatcgccgcccatgccttcgatgtaccctatatctgtgaactctttatccggaaacttactggttgctataccaactttccaggagtcattccatttggactcgcttggatggggataatagaaataataggttccatctttatatgccgcatccggcgcccacatgaacccgccttcggggcggccccactccacatcatcagagctaaggatctctccctcatcaatccagtcaaccatattgtcagatgaaaatacatggtatctgtccatcagatcacagcctctggcagggtctgtatcatgagaagcatagatatagattctgccgtcatcccatacatgagcggacggatccgctgtatacatactcttaataatagggttattcggctggataatctcaacttcctccggttctactgtgccaggctcagttacatcattcacatcaatgtaatcaatatttacccagccgttatccgctttatctcccagcgtagtagatacatatacaacattgtcgccggcctgcatgtccacctttacagacgctcgcttcttaccaagtatttcaacccttttcggagttccgtcattgctctttactgcaatgtcatttgcaggcctgtcgcctccggagcaaacataacccacaacaacttctaccacaccattttcctctctgggaacagtaatctccacatgggaagtatttttgaattcaaagtcgagggcatcaaacccacttctcatcttatccagattcgctacagccataccacctgaataatcattgccgcgctcaaactcttttcctggctcaatcccataggtaactccgtcctctgcctcataacgggtatatccctccggaacctcaggcggcgccgcaaacaccgcagtacccgtagataaaaccatagagagagttaacgttgttgctaataaacctgcaaagcctctttttctcttactcctgttcaatgtaaaacctcctctgcttactgttatacttacgattttgctattctgcagatttctgcttatgtcttcttatgtcccatatcttcatctcctccttacattttacttgttattaacagaatatcacgaaaggaacaggataatattgcttttctcctgtatgtttttgtgtcaagttattgtttttgcaaaatacctggatatttttgttattttatatgacaatattttcctattgatgttaaattatagttttctgtatgtaaagttcgagataaaatagtcggccagcgcagcgttgcagacggacggatataggagggagcaccggggggccggggtatagggacaagtcagctcgaggctccgttcccctcagctaagtcctaccagctgctaaactcgtcaggaaagccttcctcgttaatcagctggtggactggatcttcggctcactccgcttaacctccctgacttgtccctataccccggccccccggtgctccctcctatatcctggcagagactcacttcacattcacggaaaacgggtggggaaagtcgaatgttgtacacttttcctctggtttcccactattgataactcgatgttttggataaatagccaactcccttgaacttccctatacccaggtgagaggaatcctgcggcggtgggctggcggttcgggcgggagggagggcttaagttccggggacgattccgcaggagtgagtagagagtcttaggcaaaaccgggattcccgcaggagattttttcggcagtcagggccgaaaaaaagtgagcatgggcagagaatgcacatcaagcattctttgcacatacgaacggtgctccggcggggattccggttttgtcttagactctcttcgcgacggaggtgtccccggaacttaagcctccctcccgcccggaccagccagcccaccgccgcgggagtcctctcaccgtccccctgccacctacacctgccgtcctgaatcaccttgagccgaagtccaagcgctacacccctaaatcccaagttaccattacaaaaagccgcagaaatgcccttcctttcttcggcattcccgcggctctctgcttaaatcaccccgatactatatcaagtttaatccataactcactctactcctgtcaactctcccggatgtattctattttgtattacctccttgtcttcgtccataccccagatttgtttacataatacttaccaacccactgttttgctgccatagcaccgctggccttcagataataccacttaccgctgacctttacccaaccggttgccatggaaccattgctcttcaggtagtaccatgtttttccgtccagcagccagcctgtggccatcgctccattgctcttcagataataccaggtctttccgtccagcagccagcccgttgccatcgctccattgctcttcagataataccaggtctttccgtccagcagccagcccgttgccatcgctccgttactcttcagataataccaggtctttccgtccagcagccagcctgtggccatcgctccgttactcttcaggtaataccaggttcttccgtccagcagccagcctgtggccatcgccccattggctttcaggtagtaccaggtatttcctaactgcagccagcccgttgccattgctccgctgttcctcaggtagtaccaggtatttcccaactgcagccagcccgtcaccattgctccgctggctttcagatagtaccaggtatttcccagctgcagccagcccgtggccatcgctccgctgtccttcagataataccaagtatttccttcctgcagccagcctgtctgcatatagccatccttgtcaaagtagtaccactttcctccaatctgctgccaggtgtccttggtgaatgttccgtcactgttcacatactgccagcggccctgtgcatcctgattccatccgttcttaacgatttccttataaagagctttgaccgtcatatcccctgttacattggaaaagtccttgtcccagccggtgaattcccagcccggtacttccggtacctccggtgctgtggctgcatcaccttcttttactttatctgtgaatattgtttttccgtctttgcctacgaaggtaactgtatattcctttatttccggctctatcctgtcgccttttaccttccactcaatgatgcctacgcctgctgcctttttcatcatagttacccggaaagaagtggtcactaccggatcaaaggttgttacattaaacttatccatctctgttgccataccatcagggttggatacctctgtccactcattgttgtcattcaagtattcatatttgtaagaagatggcacctggacaccgccgtctccccccacactgttgtcaaaaaagtacatttctgcagtgtgaatattcacaggcttatcccaggtatagcttacccactcttctgctgcatcgtgatttccccaggttccaaagtgttttactccatttcccagagaggtttctgagacaactccgtcattaacggcatccaatgtctcccaggaagagcaatagcttgcctctgtgtttgctgtagcttctaatttatcaggatcattatccggcgggttaatcagacggaagctgacctcaaccgtcatatcctttgttacattttctaaggtataggtactattttctcctacctccactgctttgccgtcaatcagcagctgttttaccatataaccctcattgggagtcatagtcagcaccacattgccgccttccggaatgttaaccttatctgcggtaatgcttccgaacttaggcgttctgttgttcagtgtcagtgtataccagttctccacatctccgccctcgtcagacatcacagtcttaaagtacgtatggtaagcgaaattatatgcggaatacattggtacgaaggtcataccatttgtttttaatgtaggaagtccatcttccgtgtctacttttttaattgactgggacaaatccggagaaagaatcagggaaagccactgtgtcttattattttttgctaccattaccagcggtccgtacataaggctggatactgtacttccctccagcttgtcgggtgttttgtcaagatgatagtcaaaaggcatcgtaatctctaccacgtcaccgtttttccagtttctgtcaagttccaggtatgaggacagagcggctgtctccttcacttcctccccatttactttcacagtaaatcctttggttgcccaatagggcacacgaagcttcatcttaaatgttccgtcaccgtttacggtaagttttgtactctccgacgggaattggttttcctgcgtaacagatactcccttttcctcccattgtacggtagatggcatatataagtttacataaagtgtgtcattactcttataatatgctgcctcctggtatttcacatggttttccatacctgtaccgtgacagcaggtaaaagagtcatagtcacctccatatgattttctgacgcccggtccaatgggaagcatataggtggttccgttatgcatgctggaggtcgtctcctgatactgagatgcaattatctggttgtacagagtcctctcataataatccatataagatgcatcatccgggctgtactgatacagctgctttgttagtttcagcatattgtatgcggcacaggtctcacagtttctgtcagactctatgtcattggcctggttataaggagtcttaaagttttctcctctgcccacacctccgatggagtacgcatatctgctggtaaccatatcccagaagttcttgccgatattataatagtagggatccttggttgctttatattcttccatagccccaacaatctgtggtatgtgctggtttgcatggcgtccctgaatatcatcaacatttgccgccagattgtcaaagaactgcttattgtcaaagaattttgcaccctccaggtatttttcatctcctgtaatgttatacagttttgccattgactcattaaatccgccgaattcgccggcaatatacatgccccacattttctctctctgctccggggtgcacgcgttcagacgttcgtaaacccagcttcccagatccatggctgcctcaagcgcctcctcatttcccgtgtactggtaggtatccaggaaaccagccattatcttatgtaaggtataatacggcgcccaaatagttgcatacggtgtatactgctccagaagcgcaaactggtccggagagtatgcactgataaagccttccccccattccccgggatttgtgctccagatactctggtctgcattctgaggagttccctttgttttaaagtctgcggcattgcccttggacatcagctgcagggtgcgcagttcatgaatcatttcttcggatttggcctttagctcctcatcctttgtggatgcatatgcaagagccagagcggacatatagtgtccggtagaatgcccgcgcaggagcccctttggttcatcccacccgcctaaaggcttggcgccttttgtatcttgtccgaaggttgcccggaagttgtaaagcattctgtcattatccaaaagtttcaggtactctacggttctttccctgttctgtgtcagaatagaatccccatccagagtaatttcactgagatccatggtctctgcctgaatttccagaggcgtctgggcctcatctacaacatttaccgttgcctcaatgggcatagcctcatccacaatcttgccggataccttaaatgttccctctttgctgtagtcttctttctcaatctttgccggccatatagtttttagttctttggatgttttatcagaatactgaaccgtcacataggcgggcagagaaggagaaacaccaactctggtctttacggtaatgggggagtaggactcaatggatgctgtctcaaccttaggaagaactgtaacctcaaagtctctggtactctccgcaccatctttttttgccgtagctgtaagtaccgcacccctggcttcctctcctatctccggtcttgtaattacaccctctttggtgattacttcaggagcagatgtgtcccaggtaatagctgagccccattctccctctgacgggagtttcaggctgctggtcaatgcgctcagatcccccaaatccaggacctccagatcgtgggctacaattttatctccgtcaggcactgcgggcacggtaatgtcaaagactctttctacattctgaaccgtcccgtatgatccctgtactgttaattttacagcagcatccggctggcctgcctcaggcctggtaaccttacctgttgccggatcaataacgtcctctttgtcacagctccatacaaactgtgatccattggctcctgtctcgggcagcgtcagatcctcggttatctgagacagatccccaagatcaattgctgccagatctgcagagacaattccctcgtcggtcacgtcgaataagccgttcacttcattttcatccattgcatagttataaattgaaaaatccgcaaacagccccctggttgcaggatctgaaaactgtccccggccaatataattctgggtagattctgccagatcctctaaccctgcagtcagcccctctctctgggctaccatctgtccgttttcatagagcgtcagcgtatgattggccccgtccaaaactactgtggtgagcacccacttatttttttcaatgccctcttctttctgggcagcctgttcctcaccccatccgttcacagtgatagctgtggcatagccttttgctccatcattggcaccgtcagacagcagatacagatatttgtttgtgtcagaaccaaagtcccagatcctctgatatgccttatccgtaggaagatttacccagcaattaatggttgcgctttccatattattaaaaatacctgtgggaagttcaaggtatcccccttcttctccccctgggagtgataatgctctcacatcagtcccataaatattggcatcaacgatttccgttcctcccttatccatattgcggattacgccggctcttgtcccgtcctcggactcatcctttactatggtagagtttacttcctggaaatcataatgtactatctgttttctcgttgtttccgcctgtacactaatgccctcttcttccgaaagctccagtccgtaagccgcagcatccccctgctcttcctgtgcaggttcgttttccgggccctctatgccctcttctgcaacaatgccattttcctcagcagccagtacagaggccggaggaagtacagtagtagaaaccatcgtccctgcaagaagcagtgacagcatctgcattttgtttttacgcatctaaacttctcctttcagctatattttttcccatataagctcttcttctgcatcccgggaacagggatgtaagagcatatacagctccttcattgtgtaaagcagataaatttctttccataaacaaaacctcccttataaaaagcgtacaagttactgctcgtttttgccgctttattataagagaggttgtctgttttggtaattctaattatttaagaatagtggactatcttcaacttaaatcctcttacttctgtacatctaacatgaatgctgcctcctttggagatttctgttcagctaccatctgatacaccgattgagaaagctgttttgacaaaacattccaggaaggaatagaagatcgtactactgcccctgccatttgctctttaaataccttaagattggtatcctccggtatttctatattcatttttgcaggcagaatctgcgcttcctgacagaatgcctgcatcacctggtcctggttataatactccagaaacttcttggccccttctacatttttgcccttcagaatccccagattttcaccgcctacaatcacactgctgatcttatccgcgggcaggggactgacgccatactctattccctcttcatctaacatgggcaatacccatggaccattctccatcatcgcagcgcccccttccgcaaataccctgcccacatcattctgggacatattaatacagtcgcccgccatgtagttattatcaatcatacgtttcaggaacgccaatgccttttccgttccctccccgcctatctctgatgcattctcaccggttgataatatccatgggagaatctgaaacgccccctgttccccttccaccgcggacataagaaagccgctgcaggactctgtggacagagccgccgccgcctgttccagctcctcccagctttcggggggatctatattcttttcttccagcatctttttattatagatcaatgcggcattgttgcagttcatgggaagaccgtacatatggctcccgtaggaaaccgtctctaccagagacggatagtagtcctttttaacaccaagttttttcagaaagcctgtaatatcctcaaacagccccatctttataaaggcagacatatccgggttgtcaatgattgccagatccggcagcgctttctcggtgtatgccatagatagttttttggtaaactccgtcatcggtacatatttccaggatgcttcgtagctgttttgggagcggttaaacccacggatcaccttatccagggcactgcactgggcatctgtctcaaaataggtccatatttcaattttttcccgtttcttttctttctccggcgagacattccctccccggcagcccgccagcatacccgctaaaagagtaactgccagtcctatccatatatataatcttttcataactcctctttcctcagtgcagcgctctgtagtccccgggcgagattccttctacatccttaaaaacacggttaaaatacttggcatccgcatatccaacctctttcgcaatctcatagattttcttatcagtatccttaagcagacgtttcgcgtgactgatgcggaactttttgagaaaaactgaaaagttctgctccatctcccggttaaacagagtactcagatattcgggggtgatatccagactggcagccaccttttccagagaaatgctctcctgataatggtttctgatgtaatctaaggcccttttgattgtatagttgctgatattttctctctggcttaaaccggatgcaaggatacgtatctcccggttaagagtatcctccagctccttccgggtaactgcagttcctatacttttcataagattcaggttaagcagctgttcatagagtctcctgttcccttcctggctgaggcttaacataaagtgtgccattcttatgtatccttccctgatctgatcgggtttcactctcaattccgccatatagtgaataaaactctgtcccgccttatatacctcttctttcttttctccgtaaaatgcagtctgcagctgatgttccagttgcaccgggtagacatactccacaggccgatattcttggattctctccttgctgataaaaccagtatcccccagtatcatgccatatgggtactgctcccttaccttctgataggttactcctatattttccagcccctcaaagatgttctctgtccacacccatccatggctgtacagtacgttttgaagcaatttgcgttccagctctccttttacgctttcccaatttttattctccgtcaggcagataaattccctggtattctctatgtaaaagtaataaaacctttgaccaggaaactttccccggagctttccgaatctctgcatacactgtttccgttcctcctgggtagcacagcctgtgtaggcgcacaatagccggaaagagcctgcgaccgggagagataaggcttctccaacctcaaaaatcttacttgaatcatattcgctctgaatcagaatatccctcagctccctttccggtgaattctgcaatctggctgacctttccctcaggatctttttctgaatggaatccagcagacaaattacatcctccggggccaggggtttaatcagatagtcatccaccccgtaccgtatggcctgctttgcatattcaaactcagaatatccgcttaagataacaaaatgccgggccgaaccctgttcgtaaagattgcggatcatttccagtccattcatttccggcatcctaatgtccgtaataacaagatccggttcatacaattctgtcagctccaggccttcccttccatttcttgcctcgcccaccacggtatgttccgtatgattttctattaaattggccatccccctgcgaattttaacttcatcttccaccactaatattctcatcacttacccccgtctataattggcacccgcaaggttattacggttcccatgccggaaatgctgtttacatgccactctgcctggtctttgtaatacattctcagcctggagaatgcattttgcaggccaattctgtccgactcatcctcaactgctctgatgggatcattgtaaagctctaccaggttctcaggcattcctttgccgttgtcctcaataatgagaagtattctgtcctcctccggggacaggccgatgtccacacggagaagaccgtctccatccatgtcctttaaaccgtgaagaatggcattttcaataaaaggctgtaacagcaatttataaatccatttttttctagctgcatcctccacatgcacctcaaaggtaaacaccccctcaaagcgcatctgctgaaggctcatatatttttcaatccagtcctccaggtccttgatggttaccatcccattgcttttatctatactgtaccggagtatcaccccaagattccggagcatcttgcttatctcatactccccctgctcaatggccatccagttgatagagtccagggtattatacagaaaatggggattaatctgtgcctctaaggccctcagttcagcatttttttgcctgtccaccgcttctttcacttcccgtatgagctgttttacctttgctgtcatcttgttaaaattttctgctatatcgccgatctcgtcgtgctgggtaatgggaatcgtcacatcaagattcccttcctgtacttcctttatcccatctaccacctgatgcacagatctgtttatgtctttcaccagacagaagatagcggcagaggcccccacaattgcaagcacccctatcataatataaatcagctgcgccttcacaacatcccgcagcataatatccttgttatatgcgttgtaaaaggtccatccggttaccggatcctcataggaattcacagctaaattcttatttttcataagccccgtttcttccacaaagtcttctatgggcatctttggatcttttctaactcctgaaaatgctgcatccgggtatgcaactataacatcctcctccgtcataggaaaattgatccccatcccctcctcctgctcaggggtattgcagatgctgttgagcacctgctcatctatggtcatcacaatggttgctatacttccctgttccagccggtctgcatcaaacacctttttggagatatgaaaataatgcttcttttcccctctctcctgaaaggtcatggttggcgtaattgtggatcccgtgccatggatggcgtccttatagggctgtatcttccgcagatctttgtagtccttccacagattgttcatataagaatccgtctcaaaatcatataccaccgcctttccgtcactgcagatcacactgatgcatcggatcccggaatcggcagtattatactgcttcaaacgattattaatttgattgtatgccacagcctgagagctgctgttgtccattagtatcttaatattttccgtaataagctcatcctgatacatctgatagagagaattggtataaatctgtaaattgagatttgtacggtctgctatcctgacaagattattgatcatcagctgatcaactttatctgtcatatttttcgcattcaaaacaaaagacaccgtcagaataagggcaatgggcaacagagctgtgagaacgaatattatcattagctttgactggaatttgctgtttttatatctattttttaatgtcttcataacgctctcccttttgggaaactctagaaccacagctatcataccatagatttagaaaaatattaagcaggtcgggcaggtttcgtctaaccatttagtccgccctttctgcaagcatacagcctatctgattcccttttttttatcagttctatctgtccggacacacgaagaacagcttctaaaatcccattcgtatttacaggtttctccagataatcagatactccgatagataatgcctctttggcatagttaaagtctctgtattcactgataagcagaatcttagtttcaggaatcctctccttaatccttcggcttaattccagtccgtcaatagacggcagatgcacatctattattacaatctgggggttatcccggacaacctcagaaagagcctcctcccctctgcccgaagcagcgcgaaagataaacccctgtttctcccatgggatctgatacattatttcatccctgaccatatgctcagcctctactaaaaataccttcatactttacacccctgtcattcctttgtcttgtcttattatatagctgctgcccccgcggctaaattctaaatatctaagaacagtagacaattctaatataaataagggaaagagcattacaacggattccatagctgaactatgtgaggcgttaaactgccagtgggggaacctgatggaatacgtacctgatcactcacaagatgatatggagcaatataccttttctgattccattaaagcaggtatttacgatgatttttccatagatttctcacgactcaatatttaatggatttccgcccgatgttttacagcatgggcggttttctttgcccccatcctattttctgggcttttatgtatgataaagaacggggatgcagccctgactctggagaaacagagactttcgtgtaaaagagcttacccctaaaatgaggagtgcccaggtaccgggtacctgggcaattattatgaaaaaattttatatgtgtaatgaaaacattaccaatatacttgtcaaagtagttctttgaactttctatataataccaacgtcatttgaacataatatgaacattttatgaataaattgtaaaatataataaatttgcctatatttttctttagtacaaaaagaaaaatgttctatttgcacaacccattatttttcatatgcgcttaccatgtacagtacgcattattttaacgctttaattgaaaaaattgtcgaaaaagttcacaataccgtcccaaagtctctggaaaaagttacccaccttctccttatccgcatcacttaagttcagatccagcttactcagcttatcatacaaatcttttgcctgagatttcaggtcgtcaatattcagattcaatccgtcaatcttggacattaagtccacaattttctgcctgtccgcttcggaaagattgacctccagttcctcggctgcctgggtaacaatcttttctacctccttaggatccgcattctctgcctctacaactttttctttcacagcaccgataagctgctccgccttttctgaatccccgatatcctcccccagctggctggtgaccaccagctcatttgtagcggtatccacactttccgcagagacggtttctcctgtcatattctcataagatttaatcgcgcctaccagcgccgccgtaccggagatcttgaacggtcccgccacattaatatccgcgtcctggataccagccgttgccagcgcattctggtacatccccacagtacaataggaaatattctgggtctttaccttgataccataaccgctttcttttcccactacaagtacagaggaaagagctctggagccaatcacgctggcatccagatagccatccagatatttatgctcatccttattggtcacttccgcaaccgtatagttttttaattcatcttccgtaacccccagcaactcaaggacctttgcacgctcgtcctgctttaaatctgctcccagggaaatatatggtgtttcaagcttcgcatcctctctgtctgccataacagccataggtgtcataactgtcatgatacctgccagaagaaccgccaatcctcttttcttcattttacttgctcctctcttatttccttaattactccccaatggcattgccattacttcccacccattatatcacagaacatttttcattacacttaaataagaattaagattttctaatttattttggcttttccatacaattatgctaaaataaaagtaatattttacagaggtgataaccatgatatacggcagccaggaaatgatccgtgacattaacagacgactggttttagaaaaaatagtgaataacgggcccatctccagggccgcccttgcaaaggccctgcacttaaccaaggctactatatcaaatattgtgcaggagcttttagatcagaaactggtcactgagatcggcagcggggatactgctatggggagaaaaccaattatgctggcctttccacaggacagcgggcatgccctggctgtaaatatcggcgtagatcagatcactctgctcacttctgatcttaagggacaaaattgtgcggtcagagaatatcccttcccacaaagagaaccgctcctgaagtacctgaccagagttcttcacagtactattgacagtctcccggccacaactcatggggtagtgggaatcagcattgcaatttacggagtggtgtaccagaatacattactttttactccttattataagatgccccagcccgatctttgcagcctgctggaagaagaatttgggatacctgtaaaagcggaaaacgaagctaacctttctgttctgggtgaatctgccttccactttaactatcaggatatgattatgattaatgttcacgatggtatcggcatgggaatcttaatccaaggtcatctctataccggtcacaacggttatgcaggtgaattcgggcacacaatcctttatcctaacggaaagctctgtccctgcggcaacagggggtgcattgaacagtacgcctctgagacagccattttgaaggaatatgcgcgcaggagatatctgccgtctattacactggacgattttctttatgcatatcggtccaatgaaccggtagccctggatatgatggacctctttgttcagtatatgtccattgctatcaacaatgtacagaatacctttaatgcagacctgattgtgctcaacagcgcttttaccaattatattccggatttgatccagaggatacagaattccttaggcaccatgcagaaccgggactgccgggttatcttatcccagctccaggatatttcagggctgataggaggggttcggatcagtgtggaaaatttcctggaaattgaacatctgaagatcgatgcggcaactctcggcaccagatagatatttttttaacattcataaatcttttgatctttattcatgatttcttcacaagtttaacatgaattcatcatatttaacagctatactataaacataaaaataatacaggaacaagattatttttataattttctttttcatatgtcgacaaatgtcgactctccttcctttaatataaatggaacgctagcgatagcgttccattttttgtttcccttatttacttaattcattgcttaaccttccgaattcctccagagtcagcgcctctccccggattcccgcaggataaccgcagtttgcaatggcctgctgaatctcctccttggtaaaggacagcccgggatcattattgagaccgttggccagtgttttccgcctttgattaaaagaagcgcgtatcagacggaatagcagcttctcatccttcaccactatgggaggaattttatggcgggtgaggcgtatgactgcgcttcccaccttaggcctgggcataaaacagtttgcaggtacattcgccacaatgtacggctctgcgtaatactgtactgccagagacagggccccgtaatctttagacccgggacccacctgcatcctgtctgccacttctttctgcaccataactgttatggaatctatagggacatggttctcaaaaagtcccataataattggagttgtaatgtaataaggcagattggccactactttaatgggtctacccccgtttcgctcttccgcaagcttctggatatctacttttaatatatcatcatgaatcactgatacattttcaaaatcctgtaacgtgtcctgcaggatggggatgagcgctttgtctatctccaccgctactacttccctggccgctgcggccaggtactgagtcatggtaccgattcccggcccaatctcaaggacaaaatcatccttcgcaacctgggaagccttaactatcttgtccagcacatgtgtgtcaatgaggaagttttgtccaaactttttctgaaagacaaaatcatatttctgcaggacttctatagtccgttttggctctcccagatagggttcaatcatatggcatgctccttatatatcaaaatctttttcatagaggataattctgttgtcctcatctacatgacgtttggaaatcttccttcccagtcttcgcgttccccgctccgcatggtagattgccccgtcaaccatatcttttacctgagatacagtgattggctcgtcttcatcctgattgtctccaatcatggtataaagtgccagcacacccatctcatccatcttatatcccagctcctttgcataggttctggcaaaagagacaagttcatcgttagtaaaaacagggattgtaacagtcgctgcaaacttctcggcaaaaacagggtactgttccaaaaattctctcatgggttttttctgcccctccagaatcacagtaagtccgtccgtccggaagtccatagcctttgacagcttagttactgtatcctggttcatctcacttgcattttctataattaagaaccctccggacagcttggatacaatgcttaccggatctttttcatttaacttagcaccttctatgttcgcagttttcgccgcctccatcctgcgctctttacagatggctttgacaatactctgacataatctagtctttccagcacccggtcttccaacaataataagatttcctgtcttggaggttttgtcccacgctgcctcctgtgctgcgtccagggcctcttttatctgttccttaattccgggaatctgctgaaaatacgtaaaaatccgcttttcttcttcctttgtaaggtggtggcgaagcagatctccctcttcgtccctatccttctcaatatcctcaggaaatacaaaatcttctttatctacatctgtaaaatcaaaggattccgcttcttcctgcccgtgttcctcaggctccggctccttctgaagctcttcctcaaggttgatggtgattccaaggtcctctccattatcctcttcgggccctgagaatacagggactgtatctgacagtaagtcgtcaggcagccggaaaatctcctcctcagtactttccccggcagatgcctcaaggggaactatgacctctggatttggagtatctattggcgtccaggtacctggctgatctgtgggtactttccggattttttcctccggctctgcgggctcctgtatattctcctcggtttcccctgaggcaacggacgcctccgccatctccggaacttctatcggcgcatcctcctgcacggttgcggattctccgcttatctcttcccacgtctccgcagtctcttcaaccatgtcgcttatttctgatgactcttccctggaagcttctttctctggactatcctcttccactgtatcctgggattctgcttcctccccagcttcttccttctgctcaggtgcctcgatactctcatcaggtactggaatcgtatcaggtgcttcttccccttcaggaatcacaactgccctggtttctccgaaatcaatcttttctttttcctctgccggactctcctcctccagagaaccggaggatatctcctgagccagattattggctgtctctgcaagtatggcatcaatatccacgtcataattcttgtaatccagctcacccctggtcttttcttcctcggataaggattccggcacatcaaaaggctttgacgctgcgggttttacatgggaaactgtctcggctgctactgccgctttcttaatggcattagaaaggttgattgcgctcacaggccgtgacccgctgaagtcttccggctccagctctttgaccacatagtcctttgtatcttcaaaaggcgtgtattgcgtaatatccggctctgtctctccttcttccggcgtattctcctcagcaatttcctgaatctggggttcctctttttgaccgcccccgaatacatctctgatcccctgtgcgatcttttcctgaaaaattcccgcgttttcacggaccggagcaaaaagagatggttcctccacgggagtctctttcttctctggtttctcttcctctgccgcttccactgcagcctctttcttctctggctcttttcttttctgagccttagcctccagcgccgccttttcttccaggtacgttcttgtcttgaaacggttgtcatacttttgctgctgatctcttgtaagaggtgcataattcatcttcagctccatggcctttgttacaaaacgtccctcgctgaaccacaggatcaggtcgtcgcactcctcaatacatctttccctcataccagcctttgcatacagtcttgcaagttcgtacgcccatctctctgtatattcccggcttttatattcctccagaattgcgatctgatcttcaatgggagcgcgccttgccttgtaaatcttatattttaatatatattttgtattatcattgggcgcccgctttacaaactcatcgtaatagcctgcggcttcgtcaaaatccttcagcttcagcgccagttctaccaaacgatacagtacagatttcccaataggtgcccgttcatatgccagaagtaaaatctccctgctgtcatcatacttgtgattggcttcataaatctcccctaccatacacaaagtacgagcacttttcacccgccgccagtctatcgtctcgcagattttcagtgccccctcataatcctgattatcaaccaggtcattgatttgatctaatttaacccgatattcatatttatccaatgtattcacctctaactcgtatttaccgtcacttactgtaaaagtacctgatatcccatagttgtctcaagtttatcataacggaaatatgttgtcaaagtaaatgggtggaaaattgagtttacatggcggaactaagggcttttaaaaggatctaaaagaatattaaatttctataaattggattttatattctattacgcaaaatgagaagccttgtgcggaaggcttctcatttttattctttacatttgagtttcttctataaatatgcaggttgagaacatgccgttcccttttagtcttctaccactaccttatccagatgccaaatctcatccacatattcctggatggtccggtctgaagaaaactttccgcttgaggctgtattcagaattgcacttttagcccagcccctctggtctctgtaagcagcctccaccttttcctgggctctggcataggatttgaagtcagccagtgtaaaatacgtatccggtttatcgctgctcttagtattgagcagtgaattatataaatcacggaaacgctcgggatccctcggggagaaggtcccattaatgagctgcatcagtacattacggatatcgggatctgtattgaaatagaaattagggtcatagcctccgttttgttcgaagttgattacctcatcagagctcaggccgaagataaatgcattatcctcccctacttcctccacgatctctacgttagccccgtccatagtgccaatggtcagggctccgttaagcataaacttcatattgccagttccggaagcctctttgctggccgtggatatctgttcggagacgtcggccgccgcaaaaatgatttccgcattggatacccgatagttttctatgaatactacctttaatttccctttgatggaagcatcattgtttaccacatccgctacagaattaatgagtttgatgattagcttcgcacggtgataaccggcgcttgcctttgccccaaatataaatgtcctcggatagaaatccagctccggatgctccttcatcttattatacagatacatcacatgcaggatattcagcagctggcgtttatactcgtgcagcctcttgacctgaacgtcaaagattgacctgggatccacttcaattccgttgtgctccataatatattttgccagacgcagcttattctggtacttaatattcataaattcctgctgggccttttcatcgtctgcatagatttttagcttggagatctgactgagatctgtgatccagtctctgccgatatgctttgtcacccagtctgacagcaggggattgccgtgaagcagaaagcgcctctgtgtaatcccatttgtcttattgttgaatttctggggcatcatttcatagaaatcctttagttccttattctttaagatttctgtatgcagtcttgccacaccgtttacggaatagcttccggctatggcaagatgagccatttttacctggccgtcgtaaattatagccattttctttatcttttcctggttgcccggatacatctgctgtatctggatcagaaaacggcggttgatctcctccacaatctggtagatcctggggagaagccgtgaaaacagttcaatgggccatttttccagtgcttccgccataattgtatggtttgtgtaggcacaggtccttgtggtgatatcccaggcatcttcccaggacaatttttcctcgtccacaagaatacgcatcagttccgctacagttactgtggggtgtgtgtcgtttaactggaaggttaccttactgggaagctcgtgaatatctccgtgttttttcttaaacttctccactgccgcctgaatgcttgccgagataaagaagtactgctgtttcagtctcagctcttttcctgcgtaatggttgtcgttggggtagagaacctccacaatgttgcgcgccagattctcctgctctactgctttcctgtagtctcccttatcaaaggaatccagctggaaatcattgattgcctctgaatcccagatgcggagggtatttacaatctgattattatagcctacaattgggagatcgtaaggaattgcccgaacagactggtaatcttcctgtacaaactcattgcgtcctgttgaaggatcatacacaactctcacatggccgccgaactttacttcctttgcatattcgggacggcgcagttcaaagggatagccgtctttcagccaggcatccggaacttcaatctgatatccatctttaatttcctgtttgaacatgccgtagtggtagcggatcccgcacccgtaggcacaataacccagagtagccagggaatccaggaagcaggcggccaggcggcccagtcctccatttcccaaagcaggatccggttcctcatcctctatggcattcaaatcaaatcccagctcctccagggcttccttcacctcgtcatacgcggtaaggtttaacagattattgcccaatgcccttcccatcaaaaattccatggacaggtaatagacaatcttgggatcttctttgtcaaactgtttctgggatttcagccagttgtcaataatgacatctttcactgcgtaggatactgcctggaaaatctgctggggcgttgcctcatccatggtctttctgtacagagatcttatattgctctttacgctttctttaaaggtttctttgtcaaactgtttgctaatcattatttcgcctcctctttctatcagatgcttctgatacgggacagatgatactctgtcctgtgtggttccattatcaagaatgacatgagtatgatacccatgtcatcttcggtaatctattccccgagggggaaccctccggggtcatttcattcattacactctttcaacgcccattctaacatcttctgtattgattttccactctttttcgtaacctttgatttcatttaacacaatccgatcagccagaacctcatctttaatctcactttcatgacagcggatgattccttctaacacaagattgtcggaaatataaacattgattctgtccattacttcgaatccggcttcttttctcatggtctggatcttgctgattatctcccgtacaaagccttcctcgataagttccggtgtcaagtttgtatccagaactactgttacttcattatcggactccgatacataaccttcagtctgggctgtatcgattaacagatcttcctctgaaagctccaccttatttccatcaatatccagcaccaggacacctgccgcctttaattcatccattgctttatttccgtccagctccgtgagggctttgcggattccgttcagtaatttaccgtattttggtcccactgttttcagctggggcttaaaggtataggaggtaaagtctctcacatcttgagtaaacgcaatctcctttacattcagctcatcggttataatgttctgataaaattccggcagggtgaatcctgcttttacaaacatctttccaatgggctgtctgttcttgatattagctgtattgcggcacgctcttcccagcactacaacgtcaagaagattttccatattattttctaattctttatcaatccagtctacgttagccacagggaagtcgcacaggtggatgctctcgggcgcggcgctgtcaatgctgcagactaagttccgataaatttcttctgtcataaacggaatcataggggccgctactttggaaaccgttacaagagccgtgtacagggtcatatacgcattgatcttatcctgctccattccctttgcccagaagcgctctctgctgcggcgaacataccagttactcatatcatccacaaaatcctgcagcgccctggcactttccgggattctgtagttagcaagattgtcatctactgtctggatcagtgtgtttagcttggagagaagccatttatccattactgagagcttgtcgtattccaggctgtattttgtggcatcaaattcatcaatatttgcatacaggacaaagaatgcataggtattccagagagtacccataaatttacgctgtccctcctgcacagcctttccatggaaacggttcggcagccatggagcactgttaacataaaaataccagcggatagcgtctgctccatacagctccagagctttaaagggatccactgcgtttcccttggatttgctcattttctgtcctttttcgtcctggacatgccccagtacgattacatttttatacggcgccttattaaagatcagcgtggagatggcaagcagtgagtagaaccatcctcttgtctgatccacagcctctgagatgaaatctgcagggaactgtgcttcaaaaagctctttattttcaaagggatagtgatgctgtgcaaacggcatggcccctgagtcaaaccaacagtcaataacctccggaaccctgtgcatctctttgccgcacttcgggcagcggatcgtcactgcgtcaatataagggcggtgcagttcaatctcgtccggacaattgtctgacatggatttcagttcttccacactgccgatggaatgcatatggccgcactcacactcccagatattcagaggggtaccccaatagcggttacggctgattccccaatcctgcacattctccagccagtccccgaaacgcccctttcctatgctctccggaatccagttgattgtgttattgttgcggatcaggtcctcttttactgctgtcatttttatgaaccaggactctctggcataatagatcagcggagtatcacagcgccagcagtgggggtagctgtgctcaaaaagaggagcttcaaaaagaagacctctgtcctccaggtcctttaacaccataggatctgcctgtttgcagaaagttccttcccagggggtctctttcgtcatctcgcccttctcgtccaccagctgtacaaagggaagatcatatttcctgcccacattggcgtcatcctcaccaaatgcaggggcaatgtgtaccacgcccgtaccgtcagtaagggttacatacgtatcgcatgtaatataatatgcctttttctccagattaacaaacgggaagagaggctcatactctttatattccagatccctgcctttatatgtctctatgatttttgcatcttcccccagtacctttcccaccagggcttccgccatataatacgtacggtgatccgcttgcaccttcacataggtctcttcagggttcacacagagcgccacattagaggggagcgtccacggagtcgtggtccatgccaaaaagtaggcatcctcccccttcacctgaaaacgtacaatagccgaacgctcttttacatccttatacccctgtgccacctcatggctggacagaggcgtaccgcagcgcggacaataaggcacaatcttatatcctttgtataacagccccttttcccagatctgcttcagggcccaccactcagattcaataaaagagtcatgataggtcacatatggattgtccatatcagcccagaaacccacagtagaggaaaagtcctcccacattcctttgtatttccacacactctctttgcaatgcttgataaatggctccagaccgtattcctcaatctgttccttgccatccagccccagcatcttctccacttccagctccaccggaagaccgtgagtatcccaccctgcctttctgggaaccatatatcccttcatagtgcggtatcttgggatcatatccttaattacgcgtgtcagcacatggccaatgtgcggttttccattcgctgtaggagggccgtcgtaaaaagtatacgtagggccatccttcttagttttcatactcttttcaaaaatatggttctcttcccaaaacttttccgtctgcttctctctgtctacaaaattcaaatccgtagaaaccttttgatacatgatatatattcctccttttcttaaaaggggacgtgttctttctagaaagaacacgtcccaaaatcagattggggtgtccccatttcactctgccctgtccctaattaacaaaaaaagctcccgtcctgtaataggacgaaagccactggtttcgttaaccacctgttacacatactaacatacgcgttccggataacgggggaaagccgtcttcgcatactctgccagttcttacttctgtcatttccgctggaaactctggagtgatattcagtgactgttactatgcatcaggctctcaccgtccccgactcgctttggctttttgcaaccacctactgtctccgtcattgttttttctatattctccgatatattatacttacttgaggaatgagttgtcaaggtatgaaagaaataaatttgctatataatacaaaatcatctataatgggtttagatttttacaaaagcgaggatataccatgaagaaaaagatacggccgttactatgctgtgccctgattattactgccctgaccgcaggcttcccggcatcccatgtgctggcaacaccgactgatacccaggcagacgctgcggtgaatcaagaggacggaaccgcagagaatacacctactcagccggcccttcctgagtgctataactggcccatacagtccaatgagacggagggatggccccagggcccgcaggtacaggcagaaaccgcaattgttatggaagcagattcaggctgcatactgtatgccaaagggatcgatgaaaagcgggaaccagccagcatcactaaaatcatgaccgctcttgtagccctggaacacagccggatggatgaacaggtgaccttttcccacaatgcagtctttagtatagaacagggaagcacacacatagggatcaaagaaggggaagttcttaccatggaacagtgcctctatggagtcctacttgcatccgccaatgaagtttctaacggcgttgctgagcatgtgaggggcagcatagaagggtttgtggagatgatgaatgaaaaggcccgggaaatcggatgcaaaaacacacacttttccaatgccaacggactccataatgaagagcattatacaaccgcctatgatatggctctgataacccaggccgcactgaaaaatccaacgtttcggtctattatgagcacagaccactttattatccctaccactaatatcactgacgaggaaagatggctgaacaatcatcacaaaatgctccgtgagacaaagtttcactatgagggatgcatcggaggaaagacaggatatacaacagatgcaggcaacaccctggtaaccgttgcggacagaaatgatatggaacttatctgcgttactctaaaaacgaacgccaatgcagtttacaccgacacggctctgctcctggactatggttttaataatttccagaagattgccctgtgtcagaaaaaacagcagatctctgtgcgcctcctgcctttcgaccgccagttttattcggaacatgcctccggtaccattggcgaatatcaaaatgacgcttatgctgttattcccagcgatattcaggtagaaaacctcaccaaacaggtttccataaaaaagaatctggaagagacagagtactattttaattctaaactaatcaccaggcgccttctgtccctgtcctcagtccttacgtcccaaagccctgagaatgctgtgaatctcctgacagacacccttacagatcatactgacggcaatatcatcaccaagttcaaagcactcccctcctggaaatatccggtactgggaatcctgggttttatacttatcttttatattatcttgctgattcttagaataaaaagaagaaaaaagagacgaaggaaaagaaaaaaataaagagcagcatctgcatcaggggattatttcccctgatgcctttttaccttcctctttctgcgaagcagctcccttttttcccgaatcatcttcgcctcatcctcgtcggtgagctttagcgtctttactacataagtcatcccgtcatccgtcttcttcatccgtatcttccctttcagatatccatgttccgggcatatagccagacaaaaatgattcttcgtgttcatggagaaccaccggatttttttcttcgctgattttccgcacacaaagcatctggtactcactacttcacggtccttcatggcatcttctttggttcgaaattctctggacacatacttctcatatttttcatagacaatatgaatctcctccgacttcttcttaggattctggtacgtatccaatgagaaattagcccacatacagtccgctgagatgcgctttaatatctccgacgtataaaaagcatctgccagggctctgtgaaagtcctctccctttgggatctcaaggtaatccgtggcatactccagggatttccggcttttcccgtcctcgtaagagatactgaacagcttctgcacatcaaaaaaacgcactggcccctccagcagctccagctgtccgtaaaatttcatattccgctgaagctctgtgagatccattgccccccaggtacagaaacaggcgtccggaccgcaccactccaaaaaatctctgagtgccgagggaaaggtcaccccctggttcagactttccttatctattctgataatctcctgcgttctgaagtgcatctgttcatataccacaggcttgataatccggtgaaatctttgggatgtctcccggttttcatttaatttgactgcccctatttcaataatctcaaaaggaaggtgcttattttccttatcctttccattggggcactgattccattccaaatcgaaaacaatataatccatatgctacctgctattttctgatatacccattggggacgggggaaaaccggtttcccccgtccccaatggaacactgttatcgtgaactgctttcgattttatcagaatacatggctaaagtcaatttgctgcttgctgctcctctttatcttttggcagaataatgttcaaaaggactgcaaccagagtagctatgactaccggagacttgccaaatatagttgtcacccatgccggaaaagaggataaagcggcagaggcctgtgcgatccccataccgagggcagcagccaaacctacaattgaagtattccggtaagtcatcttctcagaggtcacaagcttcatacccgtcatagcgatagatgcaaatacggatacagtggccccacccagaacacactggggaatcgttgtaaggagagcagaaaactttggtatcagccctgccaccccaaggattacagcagcaagcccaagcacacagcggttaattacctttgtagttgtaacgataccaacgttctgactatatgtagctgtgggaagtcctccgaatactgctcctataatattcataacaccataccccacaatcccgttctgcagttcattgtcatgaggctccctgtccataccgccgatggtggtggcagaaaaatctccgatggcctggatggagttaatcccaaaaagaagtccgatggctacacaggaagatatctcaaagtttattccgaagtgcatcagcttaggcatctggacaatccccgcttccgctacgctggcaaagcttaccataccaaaaaacgcagatacaatataacctacaataattccgataagtatagatgacagcttaaaaatccccttgccaaaatggtttagtacggttaccactataagggtgatgatggcaaccagccagttctgccaggaaccataattttcactgtttgctccacctgccatgtaattaatggctgtgggatacagagaaagcccaatggtaaataccaccgtaccagtgataagcggaggaaaaaaccttcggattttctttaccagcactcctaccacaatagctaccacaccgcctacaatctgcgcccccaggatggtggccaccccaaatccctcggcaatggcctgcatactcggcacatatgcaaagctcacccccataatcactggcagccccgcaccaatggcaaacttctgcctcttcccgatgggaaagagctgcagcagagtagagatagctgacacaaacagagctgcctgaaccaatattaccttatccgcactgttcagcccgcccccgcttaccgctcccgaaacaataagagccggggtcacacaccccacgatcattgctacaacatgctgcagcgccagcggcactgcctgttttaaactgggcacaccatccagttcaaaaatgcttccttgtcctatccttgctttttccatgatagaaatcccccaatacatttttcaattacccttaacaacccattagcagttacgtttattaacattgtatcacattttatacaatactacaaatatttttgtattttttcttataaaatacaaaaatttttaggttttctttacttcctcttcgtcagcctgcataaaatccttttattttccattatataatagtgaaatgatacggattcctccattaatggccggcgctcaaaataaatgccatattctatgttgacatctataattgtatatgatatagttacagtattaaatgtaattaattttattacagttaggagagcgaaaaatgaatagtgatttttgtgttgccgtacacgggatggtctatctgaaccataagaagtgtcagctgtccagtgatgagctggcagacaatatctgcaccaaccccgcacgggtaagaaaggtaatggcaaagctaaagaagaagaacctggtactaactaaagaaggaactgtgggtgggtattcctttcagggggatccatcctgcctctcattggcagatattgcggaagcccttgacctaaaatttgtggaaacttcatggagaagcggcagtatagatatggactgcctggtagcttccgggatgggtgaccttatggatgagattttccaggatctgaaccaggattgtctggagaagctcagcagaataacgattcaggatctggattccagaatctttaattgccggaaaaactctcagcaaacggataaagaataagaaaaggggtgtatttatgaaacaatatgacaatattatgataggctttggaaaaggcgggaaaactttggcaggagcgctgaccgccggcggacagtccgctgcaatcatcgaacagtcagacaaaatgtacggaggaacctgtattaatgtagcatgcattcccacaaaatccttggagcacagcgccagattgtcagcggttcagggtggatcctttgaggaaaaagcagagcgttatgccagggctgtggaagaaaagcggagattaacctctatgctccgggaaaagaattatcagaaagcagtgggggctggtgtggatgtaattctgggaaaggccagctttcaggataaagaacatattgctgtgacaaaaccagatggtacgactgaactaatcaagggaagaaggttcttcattaatacaggcgcacgtccgtttattcccccgcttcccggcatagagggaaacccttatgtatatacaagccaaactttaatggagcttgatacccttcccagtcatcttgtcattattggggctggatatattggattggaatttgcttcctactacacgaatttcggtgccaaagtaactgtcatccaggataaagatcgttttatgccaagagaagatgaagaagtggcggaagctgttttgaaaagcttcgaagagcggggaatccttctgctgcccaatgcctctgtagcctctgtggatgccggtaaggatcatgctgttgtatctgttaagacaaaagaaggcactcagactctcaccgcccaggccgtcctggttgccactggacgccgtcctaatatccaggaacttcagccagaaaacgcaggggtttcacttactcccagaggcgctgtcctcaccgatgacaggctgagaacctccaaccccaatatctgggccatgggagatgttgccggagggcttcagtttacttatatctctttggatgactcccgcattgtaaagtcacagatattaggcaatggggaaagaaccacaaaaaaccggggtgagataccctattctgtcttcctggatccaccattttccagagtaggacttacggaacaggaggctagagaacagggccatgaaatcatgattgccaaattgccggcagccgctgtaccgaaggcgcagattctgaataaacagacagggcttttgaaagtaattgtggatgcccaatccggacttattctgggtgctcatttattctgcacagagtcccatgagatgattcagattttcaaactagccatagatgcacatctcccctacacagtgctgagggacagtatctatactcatccaactatgagtgaggctatcaatgacttattggcaggcatttgagatacctgcatacaaatatgaattaggaggtaactatgggcttttcagttgaaaccagtattcctgtactgaccgtatttttacagggtcttttaagctttttctcgccctgtgttcttccgctggttccgctgtatatcagctacctggccggaggagcaaagagagtagatgatcagggacgtattttttatcccaggaaaaaggtaatgttaaacactctcttctttgtaatcggcatcagctttaccttcttcctgctgggtatgggggttacctccctgggcagattcttcagtgataaccgcatctggtttgccagaatcagcggaattgttatgatattctttggtctttaccaactgggtctcttcggaagatctaaaaagctggaccgtgaacacagacttcccttccagctgaaccgctggagtatgaatcctgtaacagctttaattctgggatttaccttcagcttcgcatggacaccatgcgtaggccctactctgggcagtgtcctcttaatggcttcctcttcaggatcttcacaggcaggtatgcttcttatcggtgtttataccctggggtttgtcatcccattcttagcagtgggtctgttcaccggtgcagtcctgggattcttccgcaaatatcagaaagtagttcagtatacggttaaagtaggcggaattctgctggtatttatgggtattatgactctcacgggaatggtgaacggcattaccagttacctgtcctctcagggaacatctgcccagacacaaacagagcagccggctgcggagaaaaaagattccgacggagaagataaagataatcattctgtctctgactcagatacttctgacactgcagaagcagaggaaaataaagaagaaaaaacacctgcacctgactttaccctggtggatcagaacggagaaacccacaagctctccgattataaaggaaaaactgtatttctgaacttttgggcgacctggtgtccgccctgccgccaggagatgccggatattcaggccctctacgaaacatacggggaaaataaagaagatcttattgtacttggagtagccaatcccaagaccaacgatcatcccaacaaccaggatgagacccaggagaaagtggccgggtttttgagtgaaaacggatatacttatcccgttgctatggatactacgggggatgttttcagcgcttacgggatcagctccttcccaaccacttttatgatagacaaggagggaaacgtatacggatatgtgagcggcgccatcactgcggatattatgggaagtatcgtaaagcagacaatggacggcgaatagaagttcttctataataaataataacctgcgtgatgcagaaattacagaccctgggcacattgataatgcattagtctttgcatgtgtctagggtatcattgtatccacccaagccccggccagctgcatccaaatttcgcattctttttggatccctctcccgtccatgctcattgacaaccttcctgcagtacccagtccatgaatccccctggggaagaggtgaaactcggttggtattccatttcttcttaatgcctctacaaaaagcagagagttctctaccggtaccgtctgatcttcaaaggtgtgccagataaaagttttcggagtatcccggtctacctgcagttccagtgacatctcccgttccagttcattaccggagcctcccaaaagattgcggaaactctccctgtgcccgtaaacgccggaggttataacaggatagctgagaatcagcccattaggtttcgtcaaccaggcatccgtgcccagcaatttccataactctttctttttccagaatactccgagactggccgccagatgccccccggcggaagaaccctgaacaataattttatcgggatcaatataccattcttttgccctctctctgaggatctgtactgcagcggccgcctgcagaagtgctgtgggatatactgccggcgccacagaataacggaggacagcggcatggtatcccatggccataaactttaaggcgatcccctccgcttcccggtctgaagtcatagcgtaggcgccgccgggacatataagtatcaccgggcgtgtcagcccattatacaattcttcagagttgctccacagataagtataaagtacagccgtatccgatgcatccggcactttaatttccatgcgttcgtgtatcatataaatctccctttccctacaatcttatctcatatccagagggagccgctcctggtaatacccgctcaccctctgcaaatccagtgattttcttttctgtattacagcggccttctccctggaaaatatccagtccctaatttcttcccgctccagaaccagaggcattctgtcatgtacgggcttcatacatgcattggcctcatctgtcagaattacaaatctttcctctccctggtacgagttataacaccccgccaggtaaatgactctgtccccatctcttgtaaaagtgaatttattcttgtgcctgtcccactcatagaagctgctgaccggaattacacagcgccgctgttccatacttccccggaacatcttcttttcatacgcagactcctggcgtgcattaaaaatcactccttttccctgatatcccggaaatccccagacaaatatctcccctgacagttcctcttccctccctgtcactacgggagccgcctgattgggatacacatccctggctcccctccactctctgagcctgcggtctgcatacctgaccactttaagaatctcttcaaccatatcttcatcaatataatatctgccgcacatgaaaggttcctccattttttaattctgccgggtacctttacttattataagcaattttcatactctgatgcaacggcaatccttctgaacccggaaagttccttctggcagacctccgccttctcccgcaatccagatatactcctcccccggcagatttttttctctaattcctttcccgtaaagcagaatcatgctccagaaggttaactctctcggattttaagtttcccaaaccccgtgaatatttttccgcaaacatctgtcccagcttcagcatagccttggacgcaccctcaacagcaggcgcaaatcctgtattgcccagatatatcccttgtattcccatatcccccagcaaagaaactatttcctcaaagtcaacacctgccatatacaaagggggagttcccaggatacagcacaatttattgttttgggcagtctctcctatggctctgcttatatcatattccaaatgtccatttagctgtacatcgcagatacgggtgtaaagtacgctgtctgtacaggaagcacatcccccgggggtcagcagatatgcctggcagtcgtagtaagaaagtatgtccagaataccgctgtagtctggcctctgcggcacaaactccatgcggccggagcataatttctgtcctacccattcggaaggaatctgtttaagtatcttctccaattcctccataacggagatccgccgtttcaccataggtccccggaaaagagtatacacagggatcccctgggggttctccagttccccttccagcccatcctgtgtccacccggtcaatacctccatacaggagggatagagaataaccgcccgaatcccctccgtaagaagtgctttctggacacacgctctaatcttactgtcctgctgccctcctccatattcccatggagtgatataacaaaaaaagaactgttccagccggttcagttccctggcaattgtataaaggctcctgatgcatccgtaagtccctgatgcgactagtgccactccgtctgtctggagaatacgcctggctgcagaacatctgccctccgcattttccccttccattttaagtatttctataatctctcccataattctactcctattttgctgatttcctgccggaattcatccatttccagctcgctcaggggcctgacagcatccatgcttctccctgctatgatatctgccgccagatcttccagaacccggcacacaggtgtcttagggtaccgttcctgcaatagctcctgccggtaatccgccgccttgatctgaacagattcctccaggcgggcacagatttcagcccctgtgagttctgaaaaccttcttacaggttcttcctctgagacacctttcaagtgattcagaaccagaccgcccattctgacacccccgtatgcaaaggaagcaactcctctcatgatattgtttgccgcatatagtgacataaagtcaggcgaagtaacgatatataccttatccacaaagtgcttgcgcataggcattgcgaatcccccgcaaaccacgtcaccaagcacatcatacagaatcacatcccaatcctcctttagaattcccagacagtccagggtatccgccattgtagtaattccgataccggcgcatccgcgccctgctctgggtcccccggcctctatacaccataccccgcatgatgattgaaacaaaatatcctcccgccttatagtcccctgatgctccagctgctgttccagaactgttggaattctccgccccatcagcagacgtgttgagtcagccttcgggtcgcacccaatatgaagaacctttctgccctccgacgccagaacagctgaaagattagatgctattgtagattttccgatgcctccctttccatagaaagcaattctttttgttttctcactcatactgtctccctgtaatcatcacagacatccttacaaatacaaatttttctgtttaactcttccataaagaccaagtccagtttggccctgtacaaccggctcagattgtcctctgtcattatatcggctgcctttcctgttataaactctccctcatcgttaaggatcccaacctctccctcaagaagcaggacatgatcaggcatatggcttgtcatcaaaatgccgaaccctttcccggcaagcttcataatcatcttcatcatacgcatttgattcccataatccagatggttggtaggttcatccataagaataatatccggctgctggacgatagttcttgcaatcattaccttctgggcctcaccgccgctcagctccgtgtaaggccgatctgccagatggatgatctccatttcctccaacacttcctccgccatgcgatattcttctcctgaaggtttttcaaatgctctcagataaggagcccggcccataactacaaagtcacggaccagataaccgtatgcagctgtgtgtgtctgaggtacatatccgatttttctggcaacctctctctgttccatcctgtgcagagaaacaccgtcaagacaaatttctcctctgcagggtctgagcagattggcaatacattttaaaagtgttgattttcccgctccattagcccccaggacagaaaaaatccttcccttgtccagagtaaaagatacatttttaaaaagaattctgtcttttccataagaaaaggatacgtccttaatttctaacttcatgataactccatcctttgtttcatcagcaggtaaaaataaaagggtgccccaatgagtccggttaatatacttaatggaagctccgcacttgtcagaattctggccagtgtatcaaccagcagcaaaaaagcagcccccagcacccctgataccgggattaccctgcagttatctgctccggatattatccggctgaaatgggggataacaagcccaatccacccgatagttccgctgatacatactgcacttgcagtaagcaccgtcgcacatatgataatcagccctctggttcttccaatagaaaccccaagggtctttgcttcctgttcgcccagggacagaagatttaccctccatctcaaaataatcagtatgcctgctgccgctgcaaccgggggacccacccacacaatatccctccacaccgaatcagccagacttcccagctgccagtgggtgatggatgccagctgtgtctccggatctgcaagatacttcaaaagtcccagaatagaattcataaacccactgataataacgccggccagcaccagcgtcatcatagaagaattcttcactaccttcggaatcagtgtagcaatccctactgccagaatccccccggcaaaggcagccacttgaacaattatagaatttccgccgaataatatagccaaagaggcccctgcacacgcaccggaggagacacccagcatatccggagctaccaggggatttttaaatactccctgataagcagctcccgaaagagagagcgcccctcccaccataagggcagtaagtattctgggcagccgaagtgtccacaccacactttcagcctgcgcatcccaggataccggcagggataccgcctttgacaacagtattttgacaacggtaaccggatcaatatggtatcttcccatcccagcggcagtcactgcaagaagtgctgttcctgccgccattgctgtcagtaccatcctaaatgattttttgcttttcatggctttttactggaggcattagcttcactctgcattatctgccccaaatcttcctctgtgagttcataattaaagtaggttttaaagtattcctttagttctgtttccatatgaatatccccgaaaatctccggctgtatcagcacagcaagccactccatcatcagaggtgtttcaaccccaggagcatcccagcggtaaagtcccataggtgctttgtatacccggcggtttaccactgcattaacgctgctccagtcctggccgtctatcttattctcatacagatcagaagggaggaaggtatcaaagttgctcagtaagataatatccggattaatctccaggatttcttccattgttatctgtgtgctgtccccggccacattatccgctcctgccagctccagagcctcttttataaaattgtcattcccctggagatccagctgggcattccgcagatagagaaccttgggcttgtctgcctgctctaccttatcgctgtacgattttattttctcatatgtatccgtataggcatccataaactgctgggcacggtcgtcctttcccaacaactgacccatagccttaaggcttgcctgcagttcctcaaccgtctcgttttttaccataatgggcgcaatgcctaattccttcagctgcctggcctcatcagtctcataatcccagataaccgcagcttgaatccccagatttacccattcttccatattaatagaaaaatctttgccgatactgctggtatctgcggtaccataatggggatccagcttttccagaaaacaccctgtataggcgctcatagcggtgggatgtatggcggtcagccgttcagaacttccgtctatggcatagataaccgaggcccagggaataggcaccactgcaatcttggagagatcctccggaacctccaccacattccccgctgcatctgttactgtgcgcgttccctgtgatacttctttttctttcccattctccttaccctgtgtctcctgcccctctgtactgtccttctgtgtcttgccctcagaaccacatccgcccagtacggcagctcccataagaatgcacatcattgcagctgccagttttgtcttccacttcttgtttttcatgtcttcattcccttcctttgtcaataaaaaaacctctccacgggaacatggaaaggttacaacgacaactacatcgtcaaacccttatccaatgacccgttggatagagtttaccaacaaaatatttaagtatcctggcttgacttcaacatctggatatgacttcccggacgtaatgtccagtgtcctgctatatccgactccgtcttacagtggcggcaccgcatcggtttttcaccgatttccataaaatattttgcttataatttcttgtattgtatcacacaaaggatagggaatcaagaattgttcctatctgcatttttcattgccagctatcaatttttttgatagtatagactcaaaataacaaagggggaaccatatcataatgaaaatgaccttgcagaacttaaaatatattatagaaacaaactatccagcatttacagtacctagagggttcaaatgtaggaataatcgagaaataaacgacacccacacaaacttaaccacctctatctactgttcaaaaccgtcttcaatcacatcgcccgtagaatccaaaagaaccgagttgcgggctttgcgatagatggtttgtccctgaattgttttaccggaactgtctttgattgggtttccgcttgagtcttcgatgttatctaagaacacgaactcgttaggatatcctgcgaaagccgttccggtaataattgtaccatctgctttgtgtgctgtatagcccttcaacaaagcttcttccgtaacagtatcgccggtaaggtcgatcaaaactttattgccgaatacgactttattcgcagccatttgacaaaacctccttatccgatcgtaacagtcttccctccggcagagttgtcggtttctacatacgggattgccttaactgtaacctgagataagcagttgtactcttcatccggcataatcgtctgagcttctttggacggtgttacctccttgctctgtggcttcatatcctcagaaccagacatagcaccttcaacgccaagaatcgtcacaccctcacgaatgttagtagcaataagctttgcctgttcagtggcatcaatagacaccttaccagaaccgtcatgatagccttgcggtactgtatattctccagcaaccgttgagatggtacccttgacagcgccgttgttcttcatagtacctgtaagcttacttccacgggcgtgcgcagtctttcctacgagaatctctgcgacagccgcagtatcctcggaagtatcgctgtcgaatgtacatgtacctgtgatctttgcaccgctcttatcatgagcagtaatacctttgaggatcttatctgcactgacggaatcgccagtaagatcgataaggacatcccccccgtaaatgactttgtttacattcagatttgccataatgtttagtcctccatgacgctttcgttatttttctttatcagcagtcttgttgtactgggatgtactgattccaaggataacaccaaggaaagtatcaaccgcagtgatggttccgactacctgctctccatacgggagaccccagattccagccagtgcaaaatataatgtaccagcagccggaagcagatacatagcaatccacttaaggatgtcgtatgtcttgttactcatgctcattgtgctcttcctccttctctataaatttatgaatcgggagtttgtccacctcctgcataattcgctttgctgaaccattcccgcccatacgttcgtagggttcatagagatacactctcagattctcatattcatcctgggttacacacccacggtcaatatacgacattccaagatacatgatcctgtcatgtgccaatccaataagcatctctgtttttacatctttttgctcgcttttcttttgcaaataggcccacagcccagaagatgcaagaactgagctaaagatcgtaagtacaacctgaaaccatggttccatcgttttcctccttctttatgtgcaatcatgcagacctatcagaaacaatcagcttcttgttgaccattgtgatttccttactaaataggtcttcgtaaagctgtattaaattctttcgttgttctctggataagagtttataatgtcctcccatccaaccgcgaaacatattttcgacattgtcgtaatccgcttcttcattttcaaccttaacggcaagtttcttgagttttctacgcattgcggtaactcgatccgggtttattcgtttgatgactttacctgtatccgtaagtgtgtacttgatttgcaagaatttgtatttgctcgaaatcttaacgattctggttttcttacgattgatatggattccaagttcagctgctattttacagacgttttcgagcaagttttcaagttcttctttactgggattcatgatgtaccaatcgtccatataccttccataaaatttctgctgacgcacatacttgacgtaattgtcaatcggatatggataataaattccaatgacttgtgaaagttgatccccaatattgacggacttctccatccacttttcgccagtgagcttctcttttggaatattccgatactccagtttattgaaagtatcgatcatacaagtctcgtattcctcgtcagacatatacgaaatatcgatctggaaacctttaaatatcaacgttaaaagccagtcaataaactcatcgtcattgaacagcttcaacaattctcgtttagcaatctcatggataatattgtcatagaactttgaaaagtcaccgaatagaatataaccgtcatttccgtataattggtagtatttgtggagatggatttcgaatcgttttctctgttgtgaaattccgcgccccttgatagatgcgcagttatcataaatgatatgttttctaacttctggaagtaaaacctcatcgcacagagaatgtcggacaatgcgatcgcggatttgaatgcttgtaataggtcttattcggcctctttcgtgcagctcgaattcctgtgtcggtccattttgaagtgtccgatttattagatcatcttggatttcaaatatataccgcaggaaattcatcatgaatttttgcgtcgattctttccacttgctgcttttcacagagaccttataagccctatacaagttattggcgtcacagacaatctcctcgtagttcataacctattcaccgttataacaatacttaccgtagtaaattgtattaggctttattatttatccttgcggaacggatagcatctccttcttcgttggttaatcgaagaatccggacgaactccattagagttcgaagcgttgttgtagttcgtattgccattgttgttcacattggcaaagttagccgaagaaacgacgcaattttttagatgttaccctttttctaaccgcgacttaatcgccatgtctctttgacgccacctttttatcaatccgatttctcggtcgatagctttaacataccggttgtacacattcagatctacatcgaatatttcaacaacccgctgcaactcgttgatgagctgctcgcaatttacaatggccgcattctggtaatctctcctggtctcgtactcgtgcattgtccgtgggtaaatggtgtttgccgctctaacattgctcgttatcagggaagcacactggtttactttcgatttgaaactccgcatcagttccctgtacttagcaaagttttcttccgaaatttctccatacgcatacttcttccgaacaaagccgtccacatccttaacaccaaatcccctctgcataaggagtatcagcatatcatgcaactcgatcgagtacgtaatcgcttcgaattttgactcttttctgtcgcctaacagaacgctcattcgtaatctttaccggtgatctcagcgaactcctctttggtgatccagcccatcttcaccgcattacgaactctggtctcattccacattttcatgctgtaccaaagctttactttactgtaattcttgctatgttccatggtgatcctccttcttaaagctctacattggacatcatcgcaatgtaggcgatgtcagactgcattttggttctggtaaactcctcctcagaaatatctctaaggacaaaccagtattcgccaggaacctgctcaacgatctgaaccagctccatgttcggatgaacagtctcggttgttccgtcgctgatagtaaccggagagcagttatctgcaaatacagattcctcgattttttctgtagaaatgaaattgtttccgttcagcttaagattggaaatctcagttccattaccgagaataattttatagattttctcttccatgattagaagctcctttcaaaaatataaacggggcacaaggccccgcgattttaattaaccaaccgggaagaccggacgaaccccatgcgaggccgaagcgttggtgcaggccgtattgccacggctgctcacattggcaaagttagccgaagaaacgacgtctcttaaccactggttgtaagatctgtttacgatgaatctcggacataccatgaacaacgccagctgagtcttgctgattgtgtagatactcggaactgttgaaccatcagaagttggactgaaatgaggatggccatacatcataggttcgttcgggagctcaatgctggaatcgaaccatgctccacctgacggtcttccatttgcaaccgcattgcacaggtattctctgtgagtaagaacagacccctggaaagccgcatttacgattgttttggcgtttgccaagttactcttgtacatcgcagagcccacatatccaccggtcgtaacattggtagtattcatctgcgcattgtaaagcgcctcatccggcatgataacgagatgatgactggtaaatgcagtatcaccgcagttgtaccagtaatccatatcaacgatacgccaaatacgacctccgatactccaatagtcgccaaggaacattcctttaaaggaaccgtccttaatagcagctttctgtactgcggtcagcgctgtaccaagattcttgcctctgaagagtacccggcgaagctccaccggagcaaagccatcaagcatagcaaagagtgcgtcttcagctgcaatagccttgtttccgtccgtagtcccgacgagtaatttgttaccggataccagctcgttgatctgggtgagttcggaaagatttactcctccgataaaatctttggaacttaaaagaccgattaacgcctttgctaaagcatctgccgcaatagtctttgtcccgttaggtccgtcaagcaggaaaatattacttgctgctaacgcctggaccttttcgtagtctgtgattttcatttaatgaatcctcctttatttgatgacaaaaatagcccgaccttcgataacatcgccattgctgtcacggagaagatcactggaatatgtacgtccaatgaccgtatccaaattgctgtcagtaatgggtgcgtccgaagaatcgagcacgtctccgtaagtacggtatccattgtcataaagcttctgatataccgtgtattcgttttcaaggttggaactgaactggttaagaatatctacctgctcctgcaattccagcagcttcttagcaaggcttgccgccgtattgccatctaacagtgcctgtaactgatcaaaccattctcgaaattctgtttctgacttctgtttccagtcagccatttccgcagtattgatgcttgtgtattcgttgaaccacgcctcccatttttctttccaataggtacttgtggcttccatatctgctgtatgctccgagtaccaaaggttccactgagcttcccatgtcaaatatgcagactgaatctcctcagtctgtgccagaaaccaggtagaccactgctctttccaaaacttatttgtttcttccatatcagtagtctgcttttcgtagaactctttccactggtcctgccattgagcaatcaaatcatcgatttcgaccttgtccaatggagccgttacgaatggacactctgaagttccaacgcagttcgtgatgtttgcctgtcgaatagaagtaactccggcgccgacataaatatacgccagcggatattgccagcgatcatttgtcttcaccatcgtaggtttcgttggattcgatgctggggttcctttaatgattttgatgtcatttgctctgacggcctctctcgaatccacttcaagcacaactgcatcatatcggttcagcagaatctcggactgtggaactactaacggtaacagagcgtcattcagcgtccaagtgtgattgaaccaggctcgtccgacaccaacgttgataatcattgcttccgattcttttacaaccattgcagttccgacatgctgcaatattccgtcctgaatgattccatcgaaaatgctggacatctgaatagcatcgtagcgccgatctccttcttttgaattataaaatccaaatgttacactcacttcttcatcacgctccttcctgttctatagtcttaaaagtcggatagacggaataaccgtctttatcttctgaacgaacaatttcaagaatacgagcttttgtctcatgtccgtattcgttcgcaatctgtacaatgtccccgttaaagaaatcttttccatactggaacatgatagttgtttctgtttctccctcgaatgaggtaatgctcacattttcagcaagcttttcttttcctctttgctgcaactgtgccatatactcggcatcggtcaacgcatcatcgcttccaacatttgaagaaatgtcacgagcgtccgtaaacaattctctgcgattcaaaccagagccaccaccaaccgtagtatatcttcgatcggcgccctcaccttctccaccaaccaaggtcactgtcttcaacgaagctttagattcgatgtagttactattgatgatgttctcgaatttcggtgaaaatataacgtagggattccccgtctgatcgtatgatctatctgaaccggcatacaactcaaatacgaactgcttttcatcattcagagtgatcttgaaaccgataccctgctcctcgcaaattttctggatgacatcatacaggttatctcccgtgtactgagcttccagtttcaactttgtaattgctggatcggttgattctttgaaaataaagtttggaatttttcgattgctgtctgacggagaaattacattctcgttgagcagtgtttttattccattttgaagatttccgcttaatagtttctgtccccagacgattcgcctgtcgaggatagattctaatgaacgcccagtaaccgttacatggttaccgtcttcggtatctgaagtaatctggattttctccacgatcatcacatgttcagattccttgctctgcaaatagtaatcctgtttgatgtagtcaagaagaccctctcgcattgcttcatacagttcaaagtcaccgtaagcgtaataccgatctgtccagatgaaggactcgtacgtatccacaatagagacagcatctaggttggtgtttaaaattgtcacatccatagtgcttataccccctcgtagactatacggttctcaatcttaaactgtaaatttgtacttccatactcagcagtataagcaaagatgttgtcgcccttcgcaagctggaaccaatcagcgtttttatccaggcagttcaagatgtttgtagtctttccgttcctaagaagcgtaatcgacttgtttccttttacggtgcagataatgatttcatcacctgctataattccagagccagtgaatttctccaatttatcggtatcgatccgcatcacttcacgagtaccggtattgtagatcgtaatattgctggcttcaccgattgcgtgaatcgtaatagtcactccgatttcagcgtcgccattatatacaaccacctgctctgtttcatttttgatttctcccatttctagtaacgggtccttaagagattcattaccgaaaggaaactcgaacagtgcctctacaccatagaagatggttgtgttgattccgtcttttccggcagagtaaaagaaaggattcggacacacgattgagatatccgaaccctcgtctttactgaagattgttgggtcgtttgattcgacatacccttcaatctctgcctgcctattattggtttcgataagcattgtgagcttctttttaataggaaaatacttgtatgaaagctgtcttacgtcttcgatggaatccttccacatatacgcaagagaaataacaatgtttcggctcggcatccttgaagaattgaacagacttccatcgtttgtagcgatttccgtcgtattgatgttcgcttttcctggtcccaagccagttacagacttgatgatgaaaccggattcctccggtctcgccaaatcaagtcggatactatcgccaagatagttcgtaaacgtgactgctcgaatcaagtttccaccatcctttccatcgccgagaactgattcttcgtctgccgataaatctctgttctcgacagtgccttaggcgaatagttattctgtgtaaagttataagagttacctgtattcggattagtatcttcattttgaagattccgtccacgagctgctgcaattcctgtgctgacggttaaagcctgcgatctactgaacagcgtattcagtcgatgactcttctcttcaacgtctgacagatccagaatcggtcgaatcgtaggctgaccatcaacaccgttgtcgatcatatccttaacctttgcgattgcatttccgagacctgtttttgccgaatcagccatttcagcactggcattatatgccttcaccgcataagttccgatggcattaacgaatcccaatccaaagaaatcaccgatgtggtatcctactctggaaggtgaatgctcgtccagttcgtcttctgctgcttctgccgcagcccttgccattgctctggctttagcttccgcgcggtacgtattctcactgattccatcagcaaatccctccaccaagtaagcaccagcctgtttaaactgatcatgataatcccggatagctgttacagaagcattaagattgccagtgaaagctgtttttacttcttcggctttttccttaacaccagcgatgaacttaatcatgcactgcattcctgcattttgaaattccggatacttgtttgcgatagctgtaaggcatgaacttaagatgtttacaaacgcatttctggtttcgtaatctttcgatttaactccagcaataagcttgatcatgaggttcgcacccgcagtattgaactgagtctgcttattattgattgcagtgatgcaaccgctaataatgttggtaattgcagttttggtatttccgtcctgagatttaattccgctgataaattttgtcatcaacgtagagccagcagtattgaactgggtttgatagttcgtaagagtcgtaagtacagcctgcatcatggtcgtaaacgtagatgtcagattacctttctgagcattagccgcattgatgaatgtcgtcagcatagaggtcgcggcggatgtcactcttccgctcgcatctgtaaacgcattgatgaaaccgtcgataccgttgtttccaagctgaatcagtgctgtgctaaaaccactcataccactcgtatctaattcagccattcctttagccatttcaacaagtcgattcacctgggtaatcacacttgacatgattccggtatcgattccagaaatagaatccgaataactcttaattccacttccgaactgaaccagactatcaccaaaactatcaagatcgttgtcaccggtaaaccagcttacaagtcctccggtatttggaatggtgttggcaagctccactagggctttaccagctgttgctgagttcgtaatagccgcggagtccatacccataatagcttcagaatatgccttcatagcttcaccgaacggtacaagtttctcaccgaaagtatcaacatcgttgtttccagtaaagaatgctacaacgccacctgtattgggaacagtatcagcaagctcgactaaagccttgcccgccgttgcagaattgacgattgcatcggcttccagtccacgaaccgcatcgccaaatgctttcattgcttcgccaaatggtacaagctgttttccaaactcacccatatcgttttcaccagcaaagaatcctacgacaccaccagaatttggaatggttgttgccatctctgccatggccttgccagcgattgccgcttctgtaacggcatttgcatcgagtccagtaattgcatccccgaactgtctcatagcttcgccaaatggtacaagctgctttccaaaggcagtcatgtcattttctcctgcgaagaaagacactaatcctcctgtatttggaattgtggttgccatttcagctaatgctttgccagctgtcgccgcatttgccacgatttccccgtccatgtttccgatagctaacgagaaatctctcatagcttcgccaaacggtacaagttcctctccgaacttagataaagacgatcctcctgtaagccaagaagtcaatccctgtaaaatatcagccgctgtcagaataagcacagtctcggctaatgcctttactccgtccatcatagatggctgaatctgactagctccctgtaaaaacggctgaacattattcataaaagcggataaatcagctccaatttgcgggaactgactcgacacaccgctcataaatccgccgacgattccaccaacgaactgaccgattgccgttccgattccatgtaaaagctttccaccttctccgataagccaagaaagtcctggaagtttcgataagagtccgacggccgcaagcactaacgccatctcagcaacaaccgcgcccataccaaggattccaaccattgctcctggaacaagcgatgctgttgcactaagagcaagcataatagctgataacagaccgattccggcaattccttttagcaaagctccagtatcgattcctctcagtgcatcgacgataccagcgaaaaatgctacgagtacatcgacaccagctttaatcagtgacggcagattactagcaataccctctaaaattccaataaggaatttgaaagctagatctacaatttgaggcgtataagtaaccagagccgctaatacaccaaccactaattgtaaagctccgtctgccagctgcggtacacaggatacgaaaacatcgattagcgttaaaacaactgcctttacagcttcaccaatagctggtgctccggcagcaataactttgcagattgcgataattccttctccgacttttgtaagaacagccggaattaagccagcgataccagtaacgataactgtcagtgctgctacgattgcagtcgctccagcggcaccagcagttgccagcgctgtgaatccgatagcaagtgccgaaagtcctgtgccagctgcaagtaaacccgctccgattgtaagaaccccaacaccaatcaatgcaaacgctcccgataatgccagaatagtcggaaccaatggtgtaagtaccgcgcctgctacgccgataattgtgaatgctccggcaatagaaataagtcctttcgcaatcgcttcccacgataacgctcccaaaatactgagtaccggcgcaagaacagctaaggctccggacgcaaccaacaatgctgctgatccaccaagcgtacctttcatgaaattgagactgatagccaactcggctaaagccccacccatgacggtaagacctctaccgatctcttcccactgcatacctccgaatttactcatacagtttgcaatgatttcaagtgcgccgccgacgataacgagcccagttccaataccgatcatgttcttcggcatcagattaacagcaatagctacctctgcaagtgcgccgcccatagcagttaaacctatgccgatttcatcccactgtaattgaccaaaatcttttacagcggaagcaaagattttcattgcagcgccaatagcaattaaggctacgccagtagacattacgtgttttgcatttccagccaaattcgtaaagacagcaagttcggcaagtaatccaccgattccagctaatccttttccaatctcgctccactccatctgaccaaagtctttgcaagcggacgccaaaaccttcattgctgccgacagaataacgattccagttgcagtgctgatcattttcccgttgaattttgcaactctaaggaatacagcaatctcagcaaataatactcctactcctgttaatccacgtccgagttcatcccattgtaatcttgataaatccttacatgccgacgccaggattttgatagccactccaaatatgattaagctggtggcacctttcataacctgcttctgaccacttgccatggctttggatgatgcaacaacaatagccgtaagaccagcaattccaaccaagcctctcgcaagttcgccccaatcaaggtctgaaactttcttcaaagctcctgccagaatagataccgcaactgacatggcaatcatcgctgtgcatgctttggatacttttccagtatcactactgattttattgaaaatcgccatcgctccaagtaaattagcaaagagtacagtaattgctccaagagaagctgacagtttatcactatcgatcagggaaattgcaacgatagaacctgcaagcaaagcgattgctgcaccaattttaagtagcgttccagctttaagatttgtctgatatgcctcaaagcagcctctgaccccgtcaagaattccagttactccttcgagaacgccatttaacccctcaagaggttcggttacactctttaagaatttagaaactgataaagcaattccaccgacagcaatgctgttaagaatgtcaagaactccgctgaaatctgcatttccaagtttctcggcaagtgttcccatcatagtcccgactgcatcggcaataccgccagcaattacctttacagctgtccacaatgcttccatgactttgagaaatttacatttttccagtgcttctcccatcatctcaaaagcaacaatgactccgctcttcatttttccagcaccatcaccaatctgagccatgcgattatgtactcgttcaaggaatgagtggaataattcaaatccatggaaatcgaacttctcccctgcggcttttccaaattcttttactttttctccggcagttttaacaaacgtaataactgtctttacgatatcaacaacagtcgaaactgctttaccaaagatatctgtcttctttacagtttcatcaagcttaacgagatactcaccgaagcttccggtaagtgataacaccccgtttccagccggtaagaaaagaccaatcaattcaccaataccaccagcaacagctttgaaagcttgtccgacgatatcaagcactgcaaatacgcccttaaacgtattctttagattctttgaactctcttcccccattttgaattttgctgtcagatcacggatacgttctgtgatttcggctaactgttttccagtcattggcggaaagatttcgttaaatgcctcccgaacaggcttagcaacgctaaccagtccctcgaaaacattctttactgcttcgatcatcatggttcgaccaccaaggtctttccaatcctgaagcattttatttcttgcatcggcagaagcattgattacggcgctgaacgtatcactaacttccgtaagtaattccttcgcctcttcaaagtcgccgacgataatttcccagctttgtgtccatccggactgggcagcctctttcaatgtgtcgaataactgggtaaaagtttttacttttgtcgcagcatcattcgcggtcttacccatctccatgatggatttgatctgatcatcggtgtatcccatggttcgaagctgatcttcgttgagatcgcctgtaaattttgccaaagtttcagtcaagatgtcagaggtaagccatcctttactaagggtctctctgaatgagccctcatctttgatcatctcatcaatggcaattccatgaactttagccgtttctttcagcgcatcctggaatacctgaccacccataccagcgtttactactgagttccagtcctgtaattttactgttcctgccgctaatgcttgtgaaagctgatacatagcggtacttgcctgctgagagttggaacctgatacggctgcaaggttcgcaatacccttgatagcggctacagatgtgtccaaatctacgccagccgcagtgaacgtaccaatgttacgggtcatttccgtaaaattgtaaatggtcatatctgcataatggtttagttcatccaacgcattgtttacctgatcaagagttgtgccttttgaagaggtatttgcaaggattgtctgaacggcattgatctgggtctcatactcctcaaaaccggttttaatcggatcgatggtaaaagcggagacaagattttttccagcagcaagtgcagagttggtaatgttctgcaaagctgtaatcgccatcacttccaatgccgaaaatcgcactcgcacagtctcaactgcattactcagcggtgacatattcccactgcatttatttgcggcatcgtttacggtttctaagcctttcgccgccccttcgaggttaaggctcttcttcaacttatcgaggcttgataaactggtctgaatattctgttcaaactgtttgttatcaaaccgcatttcgacgacacgttcgtcaacagttgtactcatagcttagtaacctccttccatgccgcatctgcaattttgtcaaaaataggctggatagcaggattgatgtagtctctcccctgtacccagccgccgtttcttgttgcatgtccgtactgcaaaataactgcaatagggactccattttgaatatttgtgttgtaaaagctgatcgatacggaaccttgtttctgttcgatcttgtaatgccacgaattcgccgtcagtcctgtatcaactggcgttgcagacgcaagggcggctacgccctctcgaccatacttatcgaggtcaccgagacgaaccgattcttttgctctctctaagaaccgagtcagcttagaaaaatcacccttttgtctgaacgtgatcatatgaatctcctactttgctaagtacgcactggatgagaaccctgtgtactgaacaccatcgagtacaaactggatgtacaaccacttaactccatttgccattgtgtagtagccatagcacttaaccttagtgccagccggaattttacaaagagccttcttatttgttccggcatcattacggcaataaagaaccgccgttgttttgtattcgccggcataggctttgctaaactgtttagcagaacaggtagccaccactttctttgaaatggactggttctgatcctgcttggtatttgacggggttaccgccgatccattcagaatctgatttaccatgctctgaacttctgagtagctgtatccatactcagtaagcagtttcttacggttctcaccgcttccccacagtccaacaatcacctcatgagcaacagttttgatatctttgcccttgcttaatctaggagcggcaactgtattgtcatcgtactttggtgtgatgaagccacggataaattttccgttaatagacagggttctcttcttgaccgcattactgtagttgccctcttcaataaccatgtaaccggattccttatgtacctcgattacggtaccgacatgatctggattgcctgtgttgtcgctgattccgttatcctgccagtcatacaaaatcgcatctccaggactcggaacataagcatcgttctcctgccaacatcccattttctttgctgcttcgatgaggtaatagcaggaaatttccataggcatgatgctctcatatcggagagctgccgctaacgcagaccaggtgcacgcacaccaagcccagtcataacgcatccgaatgccacgaggaaatttgccagcgcagattttctcaaagaattcgttatacaaatcgataatgcttttgtgtgagccgttcgattctttctttccatcccaggattcgacaagattaacgacggcctgtctcgatttcgccatttttatcactatcctttcgaattaaatttctttctgtttgcggcgtttacttccgcataatgtctgtataaatctcgtttgctccgcttcttcgggggcttgttttctgcattataaatccggataagcattaacaaacgattcaaatgccatttctgacactcaaacggaatgtgatacgccgtcatccagtaataaataagttcactggttatctgctgcctatttattggaccgcctttttcttccttaacagtcgaagccgtcattggcgcttcaatataggcgtttaccgcatcaatgtgcgaattggtaatgcattgatagaccagcgggtcaacattctgtgtgagtgtcatacagcgtatataatcaatggtttcttcaattgtcttctgctctttagataagaagactttgcaccatttactttcccattttgaaagtgaaacgagcgaatgctccaaacgcaacttctgttcctttacagggataaatcgctgattccgctcatcccacagatcggttcttggtatcgtaagttcaagcattcgatctcacctctttagttcgtggtggcaaccacaggagcaatcttcggattttccgaatgcttcttgatatctacaactttcggaattacatggtttacgaattcagcggctttgctgtcatctgtagccagttccataaacagaagattgtagaactgagtgcaagcaaactttctggaaatctcttcagacttctcgaaatatgtaccgtcagcactcttctctccgtatgcctttaagataaattccttaaagaacttgataatggtcggctgatcttttgcatctacgatgcgctgaagcatctcagcaactccaccagctgtgcccagttccatctccataacctctgtttcggtaaggttgaagagctttgtttcggtgcgctcaacgccgttaaaatctttataagtctttgttactgcatacatagttttgttctcctttcgaataaaaaggagtcgccagctttcctgaatacgactccatctgtggtgtgtattatttctgattagccttctgcggtcataatcttaattacttcgtccggaagcggaagtctcggttcaacaccatcatctgcttcggcggaagaaggatctttaccatacaggatctcttcaagagcagccagtttcttagcatcgaccttggtagaatcgaaggtgagaatggaagtgggcttcaacttctttccatcgattaaggttgcaatctcgactggtgtggtgctgaactcccaggataaggtaatagcttccggactgtcatttacagttgaataacccttctcggaaggagaagccaagcaaccataaacgagatgaagcttatagccgtaatcattggaatcaacatcgttaccgagaagcgtcttgtaagataagccgaacatcttacggttctgctgtcccgcaaacactccaggagcaatctctttggaaccgtcgcactctgcgaactcatccggtgccatataagcttcgattgtgccgccaaattcctctgcggacataaggttcagatacttgatattgtctgcataaattgcagtaggttctgctccagacgggctttctgttacggtactaagaccgttccatgcggtaccagagttatatacgccgccggtctgaatcgggtaaaggacgccctgactgacaccggtctcatacaggcgctcgccagtcttgtcccaaacgagtttctttttcatagaatttgtcctccttaaaagaatatttcaaagacatcgtgatttaagttgtctttcgtgtaatgccgattgaatcggcttgtcggcatagatgccaccttgccaacgagagaactatccggatcgctgtcaataactgttaccgaatactttctcgcagacaaataaaccccgtcattcgcaaacgtattctcaatatcgtcgagagcgtaaacgatggcggggtatttcatttttaccgatgacggtggttgaaaataagcacgacactctggtcctttgtttggacacgagaggatgtcgcataaagcattatgcagtttcagtcgtctgctcattgtaaacacctccaacggtcaatattaaacggggatactgaacttcaacatttgaaattttccatttagctcccatatactcgataaatctcatcgaatgaaaattcgcataagcaaacggatcggctacgatgctgaactcattcgacacattgagattgtcgttgaggttatccgaactctgatactgtcgagtattccgaataacgtctccgtagtagtcacgaactgtaatcttctctccccagacaccaggtcgaatttcctctgttacggaatagccgattgctccgtaaaatttactcattttgaattttctcctttaagactttaggctgtgtgatcctcggaaccggaagaagcagttgttacatcctcttcgattgcaattgcagagtatacacgagtaagagcaccagagcatctggtctcaagcagggatttctcctggttgaagtcgatatcgaactgagtgaagtgagtaacctctccacccttggttgcaccgagggagtaatcagccagatttgcgataatggcaaccagcttcttctttttgctgtcggaagtggttctggtcttaccctcaaactgctccgcagtattgatactaccaacattcagtgcagtggcaagttcggtcttggaagagtaaatacgtcttccgttgatgtctcttgccagaagcatctgattcagcatatgaggagtaatgaacagatccggggtaccggtgcccttataatcctctcttgcatacagaacggtattgatcatggcctctgcgatgatgtagttctcaccaaagttagccgcggtattggttccctgaagttctttcttagcagctgctacatcgagatcaacgtgaatggtgtacagatcatcatccagccaaatcggtctgatgtgatccggagaaatcttgccttcatctccgtcgtctctaccatcacccagcatgattgcagttgccagctcttcattgagcatcaggcggtcgatgttgtacaggtatgccacatagtcgaaatcagtgatgtcgatgatatcatctctatgcagcgcactctttacatacacagtctgagggtcggtagttctgcgaaccagcttgaagttgccagtctgcttcttctgttttcccttagtatagcctttagccttaagagcatcgatgttgcggatatctacctgactagttctgattctggaaatcggactcttatgaactttgttcattacagttgtgatccaaccctggtcgttagtaatcagctccggtgcaccaggacgtacatccttgtattccgggaacagaagtgttacattgccatctcctgtctgagcaaatccgcttgcaagagcatcatgctgaagtgcattctcattagcatagatctccagcgcggtctggaatgttcctacctggcttgtctttgccagcttaaggatctcttcctggtctgcatgagacagaaagctcttatcatcgcgcttgtcggtgtcaaaaacattgtgtttcatattgtcatctcctcctttagattcattatcctcttttttaggattttctttgtctacgaattcagccatcatggcgaaaacggctgtctgctgtttctcgttcatggatttaaaaatgtcttcgatagtctcaaccttatcgtcttttttctctccattatctgatttgtcattgggctcgattttttcttcttccttctttttatccggctcatctgcggaatgctccaactgccccatgatcatttcattatagccaatgacaataccggtttcgccgtcgccatgcatcaccacatcatcgataaatgctcctggatttgcaccggctaataccagacttacttctctgataatgccatgaacaacatcgtgtccagcctgtttaagctgattggcaaagatagaaagagactgtacgtcgccatgttttacaagttcccgtgcagtctttcctgattctgtatcattaaattcacagaacgcataaactccttcatctctattttcgagatgagctaatccaagcacattcgccggatcggcatgattatgcatccatactaacgggacagtctgcccgttctgccctttgaaagcgtcttttttaataactcttccatcggcacactgaagatcatttctagtggcccagccaccaaagtcatacttcattttgattttcctcctttattttctgatatagtacgataacggatgcgatgtcttctttgatgagccggaagattttttctttgatttcttaaccttcttgtactcagactgaattttatcgaattcatcctgatacgtttgttcatatgaagagtcaaggtcggcttttgccgctttgtaagcttctctaactgacttaaccgctgcttttagctcggagctaacttttgctctttcgcttttagcattagtctggttctcagctttttcttccttggtatcagacgatactttcgctttcttgtttgtcgcatccgttcgaacactagccttgtccgttttggcatcgctactgatttttgctttatctgattttgcatcatttctaagctttgcaatctttgctgttctttcggcaacacgcttagctctctcagttttagataatcctgacggaatttctatcgccatcaaacgctcaatttctgcattctttttattatcgattcgttccttttcgctagatgattccttttcaatttcttccaaatcagaatctttatcagtatcgatgtttttcttcctatcggaagcattttgggttaaagcctcgttcagttctttcaagcgagaagatatctgttccttcgtagcttctgctttttcacgaagttctgtaatcttctgatctcgcttttcctgctcctctttgacttttgcggccttttcagatttaatgttattttttgtataagaccaaatcttctttccatcgtcattcagtgaagtggtagaacgccccttcaattccctggtacgcatataatattcatgcgctttctgaggatcgtagtagggcgatgcataatgtctaagaaccgctactttaggttcatccattaagaatcatctccctccttatcatcgccagatgtataatttccgacgatgtcatcgatctgtgcagaaatactgtcaagaacttcattaaccagagcatcgtaatcactggtatcgctggattccgttccatcaccacttgtagcatctgttacggaaccaccaggctcacttaaattgctgtttctcaattcatctgccttaggatcagcggatggcttccaaccgattacctgtctgatttcatttgatgtagcaatttcatttctggtaaacttatcagaaatttcagcaagatcagctaccggcacaagcttgaatggatctctaaagaacataattgacttgttctgggacctagcagtctttgttaagaattttctcttcatttcatcaacgattgcagaaatgataggttcaatcgtccggttgtaataattcagcatagtcttctcgtctgcggtaccatccaagatgctctgagtgattcctaactggctgtaaagcatactcgttaagtattcaatctgcttcattagattgttttccaaagaacgattcaactgcgtgattctctctgttccatcggtataagcaatgccatacttagaaccggacaactgctgctcgatatctttacgccgctgctcagcctggtgacgtcttgcctctgatttaattacataaggtagctgaatgatcaaatccaacttgccggagctgctctgttcatcgacagcatctagcaaattcaattttcgaataagcctctgcatcgtcgaattcggttcgttaattaccgcatacagtggattttccacgatagcaaccgtatctttcggaacaacaatttcttgttttcgcccagtattttcgttgtatacctcaacacggacgtgacgaggataccagtcacgaattcgaccaactcgcatcgaaagaatctgatatccttttgtgtcatctggatcatcatcggtatccacaggaacgattgctacacagccttcatccatcatggacataacaacatcttggataaatgccctaccagtctgatcaagattggcttccaacgacaaacattcgtttaaaccgctttttataacatttaaaaaccgcccttcatcatccaactgaacgtgctgaatgttgatggcggctacgtctaaagcgattctattgtatacggacgtgactatcgatctttcgtttcctctggtaaggcgaaaacgatcaggacgatatgaataacccgaaccgatattctgggacatcatggtaggggctctattgcgaaaagcattccaggcatttttaaacctggaacttaatgataaatccattttgaattctcacctcctaaaaataggcaaaaaaaaagaccccttttcttaagaggtctccagtaattttacaccggtattttgttcagtatagattcgcatatgattccgttactatcgggattataatgctcgtctaaacacttcaatgtcaggaaattcccaaccttttcttctatgtctgcccaatattcatcggtctcagataaaccgttaaaatcacagtccaatccgagtgaccgcataaggtttatttcttcttcactgaacatatgctcatcctttctttaaatatttacgctttgttctacttcctgtacaccatgtagttgttatggttccattttcaggattcactgctactgtcgcagatttccctataaactgctgacttggtcgcccaaggttatcggtttttgttttaatgctaccatgattcaacggatttttcaatgcatccaaaattccttcaacggttaccggtcttgattcggtttgtgtcctatcaagggcatgatctgaaaaacgtgtaaccagtattccgtttgaagcttttacgggtgttcgcaactggctattcattcttgcctggatagagcttctatcatgagctaattgttctttcgttctccgaactccccatttcataccttttattccataatgcatcaaattatcacttgattcaatatgagctacttttctgatggtacagggtcgtaatacagaagagtaatcaattaactttgctactggcatctttatccccctactcgaatgcttctcgatttgccttgaatgcgatgtacgcatccatcattgccgcaacggcatcaattttttgttcataccgctttttcagcaatttacggttcccgttagtatcttccagggtaatgcagtttcccatagcaaatgtcatcaagtcctcatcaaagagaagcatcctctcttctgaaagtttcttcaattcgccaagtgggacagattctgtctttgcaccctggataactttttctattccgaatggtccattttcacttgcccaacgttcaacaaattcctttgcattgtatgggtcataaccaaagcatcgtacatcataaccgcattcaataatatggttatccaaatcctcatatacttccatcatgtcaagaaccgtcccttccaacacaataagacttccctctttcataaactgatcgtatttaattctcattgctgctgggagtttcatcagagtcgatgaggaaatgtagtttctggttttgacgccgaatgatccgttcgacaatgggaataaaaatgtgaatgcacagaaatcatcgccttgtgataaatcagctcccaaagaacatggcatctgccaataatctcgatggcgatgtgggagagtttcttcatatgtaaagtaatatgtgtatccctccataggaagtccgaagcgcttagccaaaatatcgtttcgagctgccggagccttttctgctctctcaacgtccagctgataggtttcataagaaacagtctttccaaggttcggatttgctttcaaccatttatccggatcggcaacctcatcaatagaatccagcttataccaccagatcgatacgtgcggattgatataatccccttttagaatgtccatcaattccattttgattgtatcgccagcaccgttacggacagtaccctctgaactgatcgcaacgataaggtagtcgttgaccttcgatgcaccctgttcgattgctccgattacatcttctcgaatatcaccagaaagccactcgtcaaccgtcgccactttaagctgaagtccctgaagtttgtcgattctcattggacgaatttcaagaagcgatccagtaaggaagttttcaattcctttcttagtggatgccaatttcattctattcgcctttgatccggttgtgttctgcaacgatccttctgtaaggaacttatagaaaggtcctcttgatctggtaatagcggttcgaatcggggacaacacctcttctgcctgcttcatcgtcggggctgtggttatctgatgtgtcgttgtgacatcaacatttaagaagaaattctgcaagcatgaaccatacattgactttgcagcacctctggccactatgagatattgcttattaactaatctttttcggatagacttggtgacataatgtccgccatgaccatcttcataaggttcgtatacacttctctcaacaaaatagtaccagccgaaaatctgctcagcccaaactttaaatgtgtcaagcagtttcaaatctgaaccgtcagttaaagtaagctcattctcgcaataactgataaacccctctactgcttgatcgtcgtaataaattccaggatttgcaatgagatcatcgattcggttcatctccatctcgatttctcggcataccggaatttcgccacgaattacggcatcacgaaacatgccgtagtatttcgggacggcagtgttcgataacgccattattttcttctcctacttcttcttattcgggtttgcagcgatatactgtgcggcctctttaagattgaattcttttgtcattgcagtctttacggcataggtcattgctccagccgcagccacagtcaacgctttctttccggatgcagaaagaatttctgacacatactttctaccaggtgcgatgtcgtcttctgtaagattcttaaactcgcgttctaatttaagtctctcaatctttttcttcagatcggcatcggacattgttcgccgattcttaacagcagctttacgtgctgatacctcattcttatcatctgaagatttggaagaatgtcctctggctcttgcaagctgtgcttctgatcttcgaactccccatttcattccaagaattccatggtgtgctaaataggtgttattcattttgaatctccctcctttgcgatgtaactggtaacacctccgctggcattggatgtctgataatatggaacttcatgaatcacaaggtcttcgctaagcacctttccagatgtatccaaagtttgagtctgatgtgcctttggcgtaacttcgtacgatccagaataatgctcaggctcgtccggatcggcgtcatcgttttccgcagcaacatttagacgccattcgtactcgctgatttgtgttttataacactccagcacggccgaactaagcggcggatcgaaaagaagtttgaccttcaaatgcatataagatttgacaagcatgtatttggattcatcagaaatgaaatctttccacgttgcactcttatcttcgatcatgaaacctttggatggaccgacaccaagctgtgtaagaattgagaacacagaattgatgtgcatgatcaaatctacatcgaaatgttcatactcctctgcgataccgagtaatttcttgattgatgtcagtacactatctgtaatattcatgatcgcacctccatctaacagagttttataaactcactcatgcaatacccgctgataccgtccacagtctttactttataaaaaccggaaacagactcatcgttgcataccttcacaactgtatccgagccgataattcctaatgatctggatgcctgcgtcgggtctttgcgaatgtttaaattcatacaatttaccacaacacccataagtggcttcttgtttccttccataattttcctcctaatgcctccatgggcatgtatcattttttcgtcgttcatttggaactgttaaaagtagtttctcatctccataatgtatagcattgtgggtcgataaagttgttgcaattagatactctggattcagaaccaaatcagtccgcaacagtatgtcctgctgctttattgggttcatatgatgaataagaatctttccacgaatctcataaccatccaatccaaggtcgcatccattatcacgaataataatttttctccgaatgtccttccattcttgagaattgtaaaatatctgattaagatacctatcaaatccgaatgtctcttcaccaaccactccatccaaacgaagatactcgtatcgctccttaaaggttgtaagttgcaatagttccgaataacatttaagcatcatccacctcatctccatgaccgctataaccacgaaatgcttttaatgcatctgcatacagcttttcagaattttcaatggatttcagattctgagtcttcgcctctatcagttccttctgtttttccaaaatctctttttcaattctttcttttgttgaaccgagcttcaaatagtgagtaatcacctgcgacgaagcggttccctctcgtaactgcttttcagccaagtcaactgctaatgaaacaagctgattttctctcgcttctggcgttaatgctggacgcatcatcctagaagactctgattgctttgctttcctcaaagttgatgcctccttccatttagttgttcgctacttctgtgatggttttcgcatactttccagtatttaaaaggacctacaaatcatgacaatgctactcaacgaaaggagaactaactttgagccgatcccacagaaaccgttgtcaaatatcatgagttatagacccttgtaaatactggaacagctgaaaaggctccctaaaaatgccctccggggaaattttaaagaccgccacgatatgggtgggggtatgttttttagacacccccctataccccttttagttatgtactggcggtttcggcttttgatatcccgatgaaatcacttttaggaagctttttctttatgttcatttgtttctgatttacttgtaacctttcgatagatattctggaaatcataacggattatctcgtcaatggctcgctctacttccttgttgttctcttcatccgataactgatccgatgttcgagcgattcgaccaaggtaagcagttgtgtgataacccttttcctcatcgaacatgaaccattgagtgaactgttcaaatggatcataaggattatcaaaagttgtaagtgcaaacctcatcttacttagttcactcctttccattcaaatacttagaaactgtcgaagaagaaaccccaagagcttccgcaatctctgaagtgctatagccagatgcgctaagtgcagcgatacgattctgtttagctgtgctcagagcagtgcttgcacgaggagttgctctctgacgaatagtatcggcattcgtgttattcagaatttgtgtaagcttattctcagaaattgctccggcctggatagcttcccattctttatccgtaatttcaatgttagatctcttggctcctacagaacttcttgcctgtgccagagcctgctgactagccttcttaacttctgctttcgtcatatccggattgtctttccttttagcagcaactgtagcattcgccattgtctgagcctgtctctctctaggagcattcgccaaagccaaatccaacttagcatttaaagactttacttcttcagaataagttgccttagcagaagcagagtaagcaattttgcctgtactcatcatctccctacgagcctggttagctaaagacttcatagaattcgcatagtcggcataagcttcttcctggggggtacctgaagaaagagtacgggcgtcttttgtttcagccatctttgtactcttctgagttctcacctgaatttttccattcttatcgacatactcttccttaacagacttgtatgacggcgatccatcttcgttgattgtcggagagccttttctcttaagaacctgtgtctcagattttgctcttgaaattagagtagatgctccttcatggtaacgaccttctgaatctacatttccctgatacttcttcttaagagaagcgataccattgtcgatttcactctgcttataatccagtttgtgtttctcagcatcgattactaccatactgtgacgaaccgctctcgctaattcatcctgtgtggctcccttcaaagtcatatcagtaatcagattcgatactttacccatttctgtctgagtatttctcataatcttatactctttaccattacgataataatggtctatgccatcagcatctttcttaacagttccaccataagcatccttggtatcgaaaccttccaaaccttttaatggagaagtggaagtaatctttaccttactctttgtggagttacaaggaattaccattacggtatcaccatcaaagtccgctccggataaacggtctgcattcttcttattgataccgattgcatccgccggtgtatttccgagaacgctctttccttcagccaatttattgttgaccttcagaataggaatctcaaaagttccaccatgcgggtatcgaatcaaagcaactgtttctccatctttgtagtttggagcatacacctcattgtctttgattgttgttaatgggagaattacctgatacttctgacgaggtaacgccgctgcctgcaaatgtacggcggccgcatcgcaatcgtcagcaaatgattttaacagagccttctttacagtggggtttgttaatgaacagatttcatcatattctgcctgcttatcagcttttgccaaacctaactgctttttgataagtgtcaaactctgcttagaaagaaactgtgacggaagtgtcttactccattcaccccaatcgccttcttctgctctcttattgatcagagaaagagactgtttttttccggttacaggatctgtatacttaccctttggatcatcgtaatagctctgacctccatgctccttaatcagggaaccaaacggattatctggatcatccttaattttcttgagaacatcttttgtaggagtgccagactttttattagtgttgaaaatcacatcaacgccatccggcatattatctgagtaaacagccatacctttaaggtagtgagttccgtcaaccataatacggacctgtgcataatgagaatcacctaaagacaggtctttcacacctctacggagttcaattacaccatccttatcaacgccaccttgatcggcatagcggatctgcaagcgctttgaatccatgctggccggatactcaaaagattttctgaaagactccccattgtcataggagatgtagtctcttacagaatggacattctcgaagtcataaatatctttgtgctcggttcccggtggacaaatgaccttgatattggtctgctttccaggattggtaacctgtggaacgccgccgccataaatcggataaccttccaattccagcatataaagagcctggtttagtttttcttttgacacgccaagttctatttcaacgccggttccgacatcgatcattcccttttcttcaatgagttttcgcagaacatccgcagtggccttagcctggttcattctgttttccgaagtttcgttcaataaagagcggacagacgagtcattagcaaatcccatcttatcggcaatttcatttaaactgtaacctttttcacgaagaccctttgctgttgctacctgaagagcacgacgttcatctttagcgaggctcatctgagtacgaagctgtgtggtagtcaaacccatattcttagcaatgtctgtttcgctcattccggatttttttaattcctgaacacgactaagaaaatcaccgctatgctgatatggattctctccagaaccataagggtaacgcccagaacgccgtggcataccataatgcattaaaatatcttccacaatggaattcatagcttacccctcctgttctctgattttcttaatcaccttatcaaaagtaataattcggtccatgattggaacaatatcttcagccgttgggttatgatacagaatttcattgttctgatagattctcaattccatttcaatatccccaggcttcactttatattccaaacaaaaaagagcggcatatatttcaagctgctccatgtgcgccggaatctttccggtcttcaaatcgtgaattcttaagaagttattccgaaacaaaatcgcatcggctgtaccaaaacaattatcggaatagtaaaggatctgctccggtgtcatcttaaagccgatggcatcattcacatacatatttaatgtctgcttcgattttggtaatttctgattgagcatgatgcactgtgctgcaaatgcatgtaatacagttcctttttgtgtggcaaggaaatttcgatatgcttccgcaactttatcctcaccataatttatccagtgatatttactggcaccaagaaaggcgtgttgtccttcaaggttcgaatgattgttgaagttcatccagtacctcctctttattctctggacatataaatcttgaaaacgacatctgattcatacgatccacataatattcctgattcggctgcttctttgcgccagcgctttttttacattctaaggaagcccatttgtctttgtgaagaaccagcaaatctggaatgccctgaatgtaggtcgggtcatttttcatcacgatacaacccggaaatctttctttcagttccttgatcaaatttgcctggaacttattttccaacataatggagtctcctttcaattttctaaaaactcaaaagaggatgtggtatttaataaaaatgcctatttatcctctctcttcataaaagggcatgtttttttcgcgcgcaaaaaagagcataaaaaaaagacagagacacgattaagcatctctgtccaaatatgtagttgtcagctgttatttcttaaataccggatcagtatccaaatcaaccataagccaccggtacacaatgtaagaatcacatcaaggattaacccagccgtgctacgctttttctttccacctttactcatctatcgtttctcctttctcagcttctatagcttttcgatctttcttaaatatctttcctaaaccactcttagcagaatccatagtttcagaaacactttctttcaaacgttctttcttctcctgcttctcagcggccttctgttctttagcctcctgtttaatacgaacgtcatcatcaaatatcttttggctctcctcgataacttcagccgttatgtatctcagacaaacagttgtaccgactttcaccttagcgccctgcttaggatttgagtctatgacttgggtatcctcgtaatctcgatactttggatctgcttctttcatacgaagcttactctttgaaactttcaagccacgttcggttaataattcttcagcctgttccaggtctatcggaaatcccttacgatataattctggaatgataactttcgtatctattttttcagtcggtttattctgtgcgttatctattgctttttcgaccaaaggtgtaaccgcagtaatcaaaccgccaacagctccgattgctcctatgacacccgaaatattcttattcgatttcgttcccatacaatcaccctttccatacttaagtaggaatttagggcaaataaaaagtgcgccccaatttgagagacgcaccgaaaaagcgcatctcttattgttgccacacaatcctcttcgccgttcaagggtacgagtaaaagagaatacactttttaccaaagttattccctcgaacgcgatttcattattagattgtgtggctcttatagtatagcatgaagcacacaaaatggaaagtggattctgtagcaggatcctatgccacaagcatcttagcacgctttgccatatcatcgtaaataaccttggttccatcttccaaatatacgacaatgctcatgtagttgtacggacggtaatcctgggcttctttcgataaccgcggatacaccgatttgaaattattgaaaatatctttccatgttacctttctctttacattcacggcaaacctcctatcggatacaattcaccaaatggatatccacaatacgaagctccggcacctgaataaaaatccctaggaatggtataaccgaacatcacatcttcaaaagattgatacggcggattatcaacccatagccattcttgtgatatggcaatttcatttttcatcgtcacatgtgcaccattcggaatatctttattcactcgtaaatgatacggaaaatgttcgcacaaccaatcctcgaccaatttcttatcgtaagtcataaaatcacctctttcttgcttctggtcaaaaacccacttttatccgcctattactatatatttttaaactttctatcataatagtttagtattaaaagtgggaaagtgggcataaagcccgcaaacccgcataaatactgggtttttgctggtcaaatccgggtttttgaaagtgggcaaaaccgggcaaatggccagaaatttgaccaaaattcataaattttctccaaattgacaccgatttttcagttctggtcaaaaatatccgggatttggtcaaatcctaaaaccaaaaagtgggcagaaaaatgacctgttactacaaagatttttaacctagattagctgaaatcggtcagaaattccgtatctgatagggcaaattgcgcttcacaacaggcttataattgtacgtagacatcttagaatccggcacacgccttacagatttaagcttccgaccggtgcgaattttacgattctcttcctcagaagcatacatacgtccgaaggcttcacgcaaatctttagccagtttctccatcggctccaaaactttgttccacgcctctgccaaagtttcgcacgctttctgtaattcttccatagtcatcatctcctcgcctacctccaaacctttccagttcttttatccttcaatacaactcgtccctcgatatggaaatccgccaattcgcaaagtgaaaacagggtattcagtaactgatgaaatctcatgtcatccttgtcctgttcctgctccacattcttaatcgcattgtaagctgtcggatcattgtaaccctctgcattttttctgtcatccttagctatcatctctacctccccatctcatggaatcgtccatccacattgcagcattcataacagacagaacaatatatccaccaaaaataagaataactgccaaagtgataattcctaaaattaaatatcccatttacttaccctccacttcttctaatcgcacaccgccgtacacccaaagatcttctttgagtttgtccatatccaactcatcgttttgccacttttcataatattcgagaacatgctctgtaaactccggaatccgctttgcatatgtctttgtccaataatgatccatcagcacttcaagcggcagagtaagcagaagaatcatcgcctgattgatagcatcattcgtagcctcctgcttaactctatccagttcaccagatatcttttctcgaaccagggcatctaactgagctcttgtcagattgtatgtagcggtcttagctttctgctcacacttctgtgctcttctcctctcagcccggcccataccgccgcctccttaatccataatgcagttttctctcgatgcaaagagcataatacccaccatcaaggcaaataaaaagaacgttgcatcccactcgatcgggattgtcaacgctccaagtatgataaatataattccgtatatcttattcttaatcaagtctcttctcaacattgtctttctcctctttttgacttcgcgatgccagctgctacatcatccatttttatcattactccggcttctctgaaccgtccgtatgctttggctgtagcacaatgctcaatacacttcataatgcgatcaactaaagcgtaaaaacacacatagccgataagaaacatgatgataatctgaataactgtaaaatgcataagtttaatcctccgtttttcttttatagatataaccattgctactatttctagccgctccctgtaatgcgttaattgaattgagatctaaaccagatgaagacataataatctcagaatatggcagtgtctcgatccacttgcagaaatcacaccactcatccagcttatgtcctcgacgactcttataaatatttgccagaacttcataattcatcatgacattgcgcgtttgattatagctgctcgggagaagctgaatcatctgccaccaaatatctttcttgctcgggcaccctttaatctcaaaatcatctgcgttatattcaatatataattttcgataatcgtttaacgcctttattgtttcttccagtaatgctttggtgcggatatcgagatgctcacaactgaaatcatccattgtaaattccttagcctggattttatgcatggtactacagctgttggcaacagttccgactttgtaagtatcaaattctttccaccaatataacggtgctgtgatccttacgtacaccggcgacattctcataaattttctatgatctgtaccagcgttagctaagcgttgcattagtgagcgatcgttctctccaagatcgaatcctacaatatcgtatccagcagtttcatactcactatcactcttcccccagctgttcatcgggtttctcatgccttcgataataaatctcatttgttccggacttgccagaaccacatgctctaatttaatcatttttattcccctttcagaatatccagatccccaccaatctggattattatgctcttgtgttcagcatagcccacggttttaattactcttcttccttctcataaggaatctggatcacatccccaccaggaaccgtgaccgactgcataagctgaccggtttcctcatcgaagtaaatgttatccattgcgttatcccactcttcgaactgctcagcgatgtttctgcctttttccttacgcatgttgataagctcgtcatgaaccacacgtctccaggatctcgcaatttccatacggctttgagcaaggatgttgtacagaccattctcagtcacaaagttgacagaacgtctctgacctgctactactaaaggtagtttcagcttctcatcctcttcacacatttcgagcattctccactcgttaccgctactgtagccgatagcatgactaatatcttttgccttgaacagcggagcatccaggtctccgtatacattgaggcgtttccctccaaatgaaatacttccagcaattttaatctctttactcatctttgtttgttcctttctctttgtaatttaacgtctacagccttctgcaactcttctggtgtaatattaaaaatggacttaaggaattccaggcaaatataagcatctgccatctcttccaaaagtccaattctgttatcataccctcgaatctgtttactgattgcttgcgtaagttctgcgaattcctccatagcaatcgtacactttaatttccacggctgactctcaacgcttcttctgataattcttcgccgctctttatctgacaattcgatattgcttttcatgcactggacaaatctatttcgatccatcggtttcccccatccgagctttagcagcgtcctttcgctctttgtactcctcttcgtcgatctcagcaaagccgttcggagcttctttaaaatatctgttaattgctaccttgtccatggacggagtgattacgtacagaatacctacggtatcgtaatcgcctttcgctggatctacaaggaaatcctccgtataaatcttaaaggctctatcagccggcatataaggcatagtgatcggatacagttcgtccataacagtatcgatcagtccactgtgatatggagcatccggacagttgatgttcacgccatgatagcgatccacgtctctgtacttaaccgtgccatcagcatacacgtacttaaataaggaagacatgcgtttgcactgatagttacgctcttcacccttcagaccgctcatatcagaaatatcactccatacctcgtcgatatcctcaatcggaagaagcggcttgttgttgatgagacggttcagaatagccttagtcagaccaatgctgaaaccggaatgaccgtcattgcacagagagccaaaggctttcaatgcgctttcataacaagcacaaccataatcccattccccgtcttttctatctggattctctcgacggcaagcaatagctacctcattttcagcccaacgctccatgctagatttttcacggcaggaaccgatagagcggttgcgatcgtctatgtactcatttgcaaatatctttctgcaatttccgccaaatgcttccacgatttctggaaggttgtcgtttacagcatcgaagatcagtccgtgctctttacaccactccacagcctctttggtctgctcctcgtttctggatgtccaaaggatcagtttttctccgttagcctgtctttttttcagatactcgataagctcctcgttcggcataccaatctcaggccatttgttctcacataaagttccatcaaaatctactgcaataatgttctgtttcatttctaaattcccctttcagttttcaagccattcattatcaatatagtaaaaaccaaatacacacagtccaataacaattatccaaatcacccagaataaccatagttcccaatcgctttccaaataatcaacagtttcgtcaatggtgctgttttcataaaatgaagaattatcagatatagttttatcctgtaattcggtaaatatggttcctgtatattccgtgccaactccataatatttatgccggacatggctcgattcttttatagtgtcaatatgttcggtacttggaaactctaccttatttgagggaaagatatgccctaaaaatgtaatttccaaacagctttgttcttcgctaccagcataatcccaagaccaataagtttccgttctggtatgtgtctttcctttggaatcggttgtggtgacggttcgtgtatgcatattgtaatgttcctctattttttctatatacatatactccccgttaatttctggatatgaaacagtatccacagccttcaaatctccataaacgaacgcataaccgacgttggttctcatcccatattcaaacagatcagagctttcgattttaatagctttattatacttttcgttccgatcgagaatatagtttgaaattctcccagaaatcacaaaaccaatgagaagcatcgctgcaattattgatatgcttgccaaaaactcacgcttagtaatttcaaaatctccaaaatcaaagcctctgttcttcatagtatcagtctccaaataaattttgaggcgcatctaccggagcatcataatcaaggtactgatactgctgcatttcatatcctaaaatgtttaaaaataatctagttgggaattttctagcatagcgattgtattctttaatctgcttgttataattttctctatactcagcaattaaattttccgtaatggataactcattcatcagttccttgtaattttcattggattttaattccggatatgcctctgtaacagcagcgatcgcagtggttacattttctatactggttgctttttccctaccctcgacaatagctgtaagtgtttcagcctcatgcttatcgtattgtttgacacaatccgcaagattgtaaacaagatcgactcgtcttttttcctgaactttaatgtctgaatccgcagtgttgacctgttcctccaatgcgaatgctttgttttgtgctccctgaattccaaaaatacacataaaaataaccgcgacaatcccagcggccacgataagtaccagtttccaattttctttaattgctttcatctctacttgtcctccttaataatcccgataaattccactcgctcttctgccagacttacgaaatacctttttcccttataatcgacgatgtcaccctcgtacttataattcttgtccggctccgaagcatacgctaagatgtttatttttgtcgttctattcatagctcctccaaatatcaagctccaggttgcatggctgattgatccgcatactgcaatgcctgaagttttttcttcatattgtctaaaatatactcgactgtgattttcgttgtctgcgccagttttatatacttagaatgttcctcgtaccacttgaatatctcatagagatttccactctgccaactgaatgaccaccaatcgcaaatcatctcgatgatgtaatcgtatggcatttccaaaacggtctccagttcgccaccttccatatcatcatgaataagaatccagtgctgccaatgatgaggatttctgtgaatatgaagtaaccatgctcgctgatatcgctgtacaacctcataagagcgattatttccatagaaatatgcatcgtatgcctcatactcatccggttcgtttttagactgatcatgagcaaattctgtattccacccggcggttagggtgtttgtcataagtcccggtaaatttttagaaagccagtcgaacccccttttcacattagctcgatgcctagctaaatattgatcgtattgaaaactcacttttggccctccttctttttctttgttaccagcttttcataaagttctctcgcttcatctccctggaaagcattgataatctcgacagactgattcattcgttttcttcctacaaccattactccagtgtcatttttgtttgaaaaatcaacactaactaaaatactatctaccattttcagcctccttccagtaaataggtttatccgaatttgcgttcatcggttctgccaaacagtcattacaaggatcaaatttttcttcgagatccttatgttcgcaggttttgcaataggttttgaaatcaacctctttgtaaatattttccattggacacctcacatgtaatatcttaacaaaattgcatataatctttgttgatagtcacactctattagcagactgtaaaaatcttccgcagacatacttttcaacttgatagataaaatttttaaaaatatccacagattataaatcattgtctccacttaacaaacctcgtttcattaaatgttttcttgtccttcaatgctttactgatggcaagatcaataccagacctggatttcaaatgatagtaatacagatccgtatatggtgtattcatcctgtctattcgaccagcagactgtgccatgatcttatacgaataattctgagaatagaatataatcgtgtccgtcgtaatacagttccatccttcagccccggcattgtactgaactaaatatacccatgcatcgctagtcggcactggctgatgtttgtgaccgttccactctccgacttcgtatccagagaatatctccttcagaagctcaagctcataatcgaaattgtagaatataatcgctttcggatgcttttccacaatttcaagtaaagctatttgtctggactgatcggtgtttacaatctttctccacacatagcacagaccggcagcattgataattggttcttttttaaacgggtcccatctggtttttccgacatctttatacatttcgatattgtacttgacaaaaatatcctcatggtgcgaaaccgtctggcgtttgaaatccatattcaccaagattttgtttcgcaatcgaatcaatctaccagtattcaaatatcggtcaactttaggaaatttgctgaagcgactatagactatatgctctcttgtaaattcgcttcggtttttataaaatccgttagccacaaacaccggaatataatcctgccacgtatcaccaggagttgcggatagtaatatccactcatttaccttggcgattttcaaaaatgctttaacccatgttccagagcctatgacacgctgctcatcgaatataaagaaagcatctttgacatctgcatacttcttgatgttgttccaggaatcaatcacaaccttattggtatataaattctcttctttatccgttgataatagaaatggtgagagttcctcttcccattcaaaggtatctcgtttcctagcggttgtgattatgtacaaatccttaatgttcacatcgtccattggaacatactcatccgttccaagctctccgccatttcgaacataatagtaggccagcgaagttctggattttccactaccaacaccgccacaaagtatgcagccgtttcgcatttgccgtacagcatcttcctgatagtcccgtaattctacgccagccattacacacctttcgtgacaaatccatcttctacctcgacttcgtagccatcgccatccagatctgctttgggaccatacaagagcatacaggttgttatggtttcatcgctctgattctctgaatgatagaacttatataagcagtccagcacttttttagtgatagataatttacggcaatcgtatacagctttgcttacatcagaaatcccaatgattttagcaacgttgtcataaagctcgctgatgccgcacgtacactgctcttttggaatagaatatcttttcttcattcgtcatcaccctttccaaataacttgttaatctgacggagcattcttcttgtactccatacatctgagaaatacataggtgtataccaatatttttcagatgaatcgtccgtagatattgggtcagttatcgagttacctatttttataaatccagccaatccgagaagcgagatttggatataacacatcagaccaacgatttcatcaacgtcctgtgcaactactaagatatggttctggtagtttctcggtggttcacaatgctccagctgttttcggattacatgcacaccagcaatcaacgtcgctccagcaccgcagcatggatcgttaatcgaaatataaccatattgctctatcttttttaaagcatcagtcgctaccacttcggccataagttcacaaacatgatacggtgtgaagaattgacctgccgaacgatttccaagatccaaccgcataaacatttttccgaggaaatcctgctcttgattctgatccagggccatggttgtatacgctgctaattctggaaatatagcttgctcttcttttgaatactgatgaataatttttagataccgcttctctctttggtcgtagttttccttgtccaaaacattcgagattgaacatgcatgaagtaaaatataatctctccacacatcccatgcccgatgtctgtatgtaagtttctgaaaagattttaagaatttattttccaagtcaattttgggttcggatttcgtagttacttccggtggtttctcatccttctttttcgtttcaccgaaagttggttgccacttaggtggcggttcttttgctttgaatgttttaggtaccgtagtcttaatctgtggtttcgacttcgtttttttcttattccaaaacataatttttctcctttcataaagtaagagtgccggctttgacaccgacaccctcaaaatatgatttatgcgaacggcggctcctcttcatccgcatatttctcagcaaacacgtcctcctcaatcgtgacgtacatggtcttcaaatatgccttaatgccggattttccattcacttcccactttgacgggctaatgaccaaatcaacatttctgatttcagcatagtcaagagaagatacagactcctcatccaactttgttttagctcttctggtaaccatatatacattcggcggaatgttatcgaaccgaacagctacctgaatatagtgaagaggttcttcatcctcatctctcggcggaaggattcttacattccatccgtcttcgccgagcttctgcgcctggtctgcatccggaatcacaacgcagaagttacggttacctgctctgttgtacttagtctcttctcctctgaaatttctgaacataatacgagcattctcaataatcagctcatttacatttgctcttgccatgattaaattctcctttattttttaattttccggcggattcattgcgtgcttcatcacgatatctgaaatatcataatcaaggtcacaatccatgtggaagttatcattgttgaaatgcggacagtcgaagcatgtccgatacttatcctctccgcaaggcatcgcccatggaacaacacaatcgacatcagcgtcgttggcgccaagttctggaatatacggatcatcagacacaaaccactcaaagtctccgtactgagaaatagtttttacagcctcatcaaccagcttgtcgtagtaggatcggtcaatgccgtcttctttaccaagttctttgaccatctctgattccatccaacgataacctttagaaccagttgcagcatagtaacgaccgtctttttctctcatcagaagtccagctccatatccatctttcatcggacagaactgaccaacctttccaataaaatgatagtcgtgccctttttcaatcaatggagtaagcttctgacatgtagcttcaaaagtggtgtcggataacaaccccttcttatagtcgctctctgccttgctgaattctttttcttccttactgacatccggtaattcctcattcagatccaaatataaagagctactcacagatttggtctcgcacatatcttcaaatgcgatgtcttctctgctgaacagcttcttaaatacatatggaatctggaactgagtgcccgttgccgtccattttccgcctttctttttgttgtcgccagggacataaccatacatcttctggcattcttctgccgatttgtactttgcaatatatacggcatcgttgaccaagcacatccgatcgtacgtagcctcgtgttcaaatgtgtatccatatctctcaccaaagtccatgacaaactgaatgatctccggtgtagcatctggaatcttaatagagtctgtcttaatatgagcaacttggaatccacgcttcagaacctcattcttaaggtcaatcatgaataatgctccacgtttcgccacaatgttgtcgatgtttcttggatcgcggaacggattatcaaaggatgccgatgtaagaccgtatactgaattgatagccgtcttaagcgcattggcaagatcctttgatgtcatctcgccgtcgataaccctctgaatatacggagtaagcttgccgtccagcatggtattaacaatatcccaagcctcatgcttaatacttacacgaccctcaacaatatcacggaacgccttcgtaaatctcggtccaaacagaacctctgcaatagcactatgcggatgcattgaagaaatatccaggagtgctgcatttccatacattccgggtacgccttgtgcaaatccgccctcgcctacttcttctccacgatatgtagattttccatggtcgaatacatacccagggaaatatggaagaatgctgtgagattcaaatggaacttcgtccttatcgttgtacttccaaccatagtgaggctcctccatcatcttcgggcaggcttccttaaggaaatccatactctccttatccagcgactctaccggttctgccagatttctgtaatggaactctgactggggtttccggttgtttccaaatataattctggttgtaagtgagttcgttgtatcgttaacggtcatttctgctaaatctgccagaatctgtcgcgccgtccagtcagcctcaagataattaaaggccgcctcagtagcaataacatcgttatcacaatactcagcgaccttaatccaaagctcttccggaaccggttgatcccatggaagaccaagctcctgatgatgcgttcctgccttgataattcttattttttcatcggagaatccttttttcttgagatcgtcatcggtgaggtttcccatctcgatttccaatttcttaagactcttcttattaccagccgaagcgaagtcatacacatccgtataggatacattatacgcttctccaaagaaacagttcggacttccgttaatgatcttctgcgaaaggttgtagagctgttcgtttgtataacccatcaaccttgcgtacagaatatggttatcatatctccgacagttaaagccaaccagtctgaaccgcatcagatcctcgatctcactcggagacgggttaatcattcttacaacaggctttccctcaccctcgattttccagttcacaaggaataagtttgggaaaacctcaatatcatagaataccagctttgcatcatcgtttttcaccgctgtggacggatctgcggacttaaactgcattttgttgaccaacttaatacagtaatccgcttgatgagtgctattcgctgcaaatgctaatactgcattgcgcatgtctgtgacgtcgtacttcaaatcgctttcatacgcatcttccagtatcttgtagataaaatcgatactgggcttagttcccggatgtatctctttgttaagattccgtttgatcagtgttctaagccctttctcgctcttaatcgcttcaaaatttaccattttttgttctcctttcagcggtaaaccagagctaattgttgcgataggcaaattattacactttgacagcatacgccgtaaagagcttttgcccgtgaacaccttaacttcaacatggtcgtcatatactctgctaagctgcgtcggatcgccggtataaatataatgaagatgtataccttgtcctgatttactaagctcggcataggtaggcggccacttacttgcttctgctaaattcttttcaaatgacttatttccagattcgtctggaatatcaaagtcaatcacaatatgattctccggaactttcacataatgaagttttttcgtatcaattccagataatttcgtgcggacagaatcccattttttctgaggtgtttcgttttccgaagcatactgtgcagggcattccgaacacacatcatcaaatatagattcagtgctatcgaattggatcagtgccggtttgactacttccgccttttcctctacagtttcttcttcaaatttttctgttctgaacccgatgtaataacttctaacgcgagttccatcatcaagattgaagcgttcctgaaaatcatgaaaatagtttttaagttcctctttgaataccctctgtgaaaacgggagcccaactttggcgtcgtcacagtatgttttgtacatctcccatgcggctttcagagttgtcccgttttctttcttaaatacatggtacgaatcgataatgaagttatagaaatcattagatgcaccaagcatcgtaatcggaatataatcgtcataacgaccaggattgttcgaatatacctcctggcagtggtaagcgatagctcccaactcaaattccacttgcttcacaatcgttttgtactcttttggattcagcttatttccagacggcgatacatcgatcaatcgtcgaatcagaccggactttgcatccgtaatcttgaccggcttatttgttcccataaacaggaaacatttgaaccggtttgagtacgtagacttgaatttttcgttcacagtcatcagctcatgagataccaagctgttcaatctggtattatcctcaattctcgataaatcgccatcgtgctgaatggcaaccagagggtttgttttaaatgcttccaatgcaaatgaattgctggaagatccaagtgcttttgcgtcaaatacagaatagtatccgtcgaaaagctgctgaataatgttaagaactgtggatttacctgttccagcagctccgtataaaaccataaatttttgcagttttttggattctccagatacgattgaccctatggcccactcaatttttgtccgctcttcttccgaatataaagtagacatcaatttctcataggcagacaaatcgccagcttcaagcggataattcaactttttgctggcgtagtcttttttattagtttctgtattggaaaatataagtttgtcatccaacgtatgaaagctgtccctcatctgcttctgacaatacttatgccatgagtcgatcatacccgactcggcatcccacatatgcaggactttaatatcggagttaaaacgctggcggttctcctcagcatatctatccagttcgcggtcaatgagctgcaaggcatcttgctcgtccgtagaccataaaccacgttcctcaatccagatagcatagaaatcaccacctcgaatcattagatcggtgctttttttaataatgaactttggatagatttctattactccacgtttcgttgaacgtgttgaaatcaccataaagtcgatcatcgcattttttactctccttccggacgcttaagttcctcgatttccttttccagttttctgatacgcagtgcctggtccttctgctcgattttcataacaaccaagtttgcagttgtcatgacagcaaagattgtgagctgcttattgaagctccgctgtttactgaccgctcttgtaacaacgtccaatcttttctcagatgaccgtaagctgctaaaaatataagtaagcatttcgcccattacttcttacctcctcttaatccgttcatgaagctctcaacagtctcaaaccgccaatttccttcgttgttgaacgtaaatataaattcctgatggttcttctgacggatgcgaatactgttctttccgttctggaaccaggtttccacattatccccagcgtactgcggaaaatataactcgaaccacttgtatacctcactatggctcataacgccctcctatctgatattgtcgagataccagttggcctgataccaaatctcgatatctctcatatcgtatctgcaatgctcgattgtgaataatccacccttgccatcccgtccgtagtcacgatccaggaatcgccgaataacatcgatggcatgagctttgtcgaatttggaatcatccatggaacccaacccaaggctcactatcatatcccaaaaccactgacctgtccgattaccgatgtcaggatcatccatgatgtgctcttctaagcgtatagcaagggcaataatcatttctaaaacactgcacggacgattatccaaataacttgcaatcatactatcccggtatccttgctcgtttccgaatctatatcgaagatcgatcccatcgtcatagcggttgccatcaagagcaatcgtatacgtaaaatccgtatcatgaagcaaaaataacaacttacgatacgacaaacctcgcgaatattcatcgtcgcatacgagctggtacatccagtcaaaatatgcattgttcagctcatcccgtgtcattatacctccatctgatgcggcatatcttcaaccacttcagaataggtcctctgatcaaggagaatttcgtaatcacactttcttgcgtcattacgaacaaagacagagtcgtcctcatactctccaaaatgattcaaagaatcaattccaacagcatcttccacatcttcaattacttcatcgttttcatcagccagtacaccatctgcatagtaggtaaggctgatctgctcatactcttcatcgtcaccaaactgctccggcggaatcacatacggaccggcttcagaaacaggcttttcttcctcgtccgaaccgaaatcagaatatcgggtgtaaccctcttttttcagacgttccgcatactctttaagatctggtttttctttgtccgcatctttaataccttcagcaacggttttctttacggactgatcctttaattcctgctcacgtcttaagaaaacctcttttacagaatcaatttcctcctgagcgagcgcttcgtatttatccttaagcaggtaccatgtcactactgatccagtcgcagcaccaatgataaatgccaaagaaaacagagatttgttactcatcttcgtcctcctcgttctgaattgtcataacggtaagcgcaagcccaccgaaaagtaaagaggcactcaacagaatgccccctgtgatatgtctttttcttttggtatccaatatgtaatccatcatggatataaaatttccaatgccatccatcagtgatgctcctttccgcccataagaacggccagaccactaacaaagcaaataccagcaaatgctgaaaatgttaatcccataaaacctgtcataattcaggactcctttctattcatagctcgaaaaataatggttacctacttgaaacatcggtcttccgtattttccatattcaccagccgtgaagaatatcgtatctacattagttctggagtgcaattcctcttcaactaactggcaaatatcatcgtctacaaagcacttatcaattctcccattccacatggatgaaaactgatttgcttgatatacaacaccgtacactgtatccgggaaatatacggaatcaacacgatttaatatggtgtcgatcactaatcgctttccttcctcgcattcgccctcagcttctgccatagttacaagagcaatcagctcaatatcttcccgtggcaatagtgtatcctccacatactcttcgatttcaactgccgacaccgtttcctctaagggttgctcagaaataattacaataggatcaataggttcagcttttaaagtcggctgtatttcgatatattcataccggtttacctgttctgccgagcagacaaaacctgtgcaaataatcgcaaatacgcaaagagcaggaaggaccaccatacgaatataatttcgcatatgtatcctcctcaaaaaaattagatcagatcgagaatcggtccgtctacattgaactccattagaatggctttctcgtaaccaccatcctcagtttcacggttggtctccagaatcccgaaatcaacgaagttgtcgccattttcatttccttccggtttataaacccaaccaacaatctggctcattttggtacgcttaatgccaagctgatcgtatacatcgctgaggaataaatatccattagctttaagtttgtcgtttgccagattctgctgagagcgcagatacataaggttgtaatccatattggattcatatgcctcgcaggactcatcaaagaaacgggcgtaatcgttcgtagaaggtgccgccacatctacggcggacttcacctttttttctttaccgctgtccggatcagttacagtttcctcaaatttctttgccttgatgttgtagcgaagttctttatcaacctccgcaccaaagcgttcaacgactcgatttctgtattccttgaaagtcttatccacagtcgcataggctgctgccagtgctacatttctcttcttgagaatattgtgagacgcaacaatacttgcgatggataaagttccaagggcaacagcaggagcatagagcttagcaacttttacgccagcctgtacataaacaatagccaaatctttctttgcatcgtccttagaatactccgtcgccagttcctcattttcagcacatttgtgaatagcatcaatatctttcttggacttctccaatacgctgtctaacttagttgttgcatggcaagccataacagcacttgcaacggtaccaacaacaccagccactatcagaatctcagggctatgcttcttaagtttcacacttactttgctgaaggtcgtggaaacgttcttcatgatttcttctttcttcatatcagttattctcctcttcaattttttctttcttcaataaatgatcgatcaagtgctgcgtgtaccacatgatctttttcaaatcctgaattccgtttttatttttccagcggcacgcatacttgataatgttaccagtatcggttgcttcgataccttttaaatcgaaagtgaatgcctcaataacatcgatcacttccaaacctgtttctgactgataatggctcggatgagacaccattttatcgtctgattcgtacataaatatccctcctagttcaacggtaatgccttcggaagtttaatcatgtatccgtctctcacacgaattacagatgcattccgaatatcagtccagccgtatttattgtctgtatagttgccagaaacgccaaccagatcatagaaatcggcgacactaactacctggtatgtggcaataagctcgtccattctttccaggacatcttccgcctcgccacgagattccagaataatatcatcataatcgtatccagttcgtgttcttgatacgtttcccgaatctcgtcgatcccgatcgtcataatacttacggtaagagatcttggatgacgttgacgatctcccgccccttgagtttccgctaacaccaaggaatgctctgacagcatccaagataatgtcttttacggctggaaccacgatgtcttcaaaaatatagctttttacatcgtctacatcttccggaacaaatacgttcgtaatcttctgaagaccattctttttctttgatttgacagaaccactgacaaccttttcaactcttttctccggaatatcatcattctggttctgtcgtgatttatgggaattggatttgtattcctccatctctaaatctcctttcaattaaccgttaccacttttccggggagggttatcctcgtacttggaatacggtttgttttcttcttaaactgatacaccagattactcctggctttcttttcagacgccgcgtatgtagaaccctgccatctatttgcaacgcaggtatcaaactccataaccggtccgtcgtacatatactgattcataggacacctcccttaaaaagcaaaagggaaagcaccctgttataggtactctccctctgtccgaatcatcgattcaattcttattcagaatcctcttctgtctcttcatcgatatccgtaaactctccgtcgacgatatcgcccttcggctgagttacaaccgtcttacgattctcacgccagttcttgaattttgctgtggccggaacgactacaaatttgtaggttaatgcacctgcaatcatagccaatccgatagttgtcgctttcttcataccgccgttagaagccgccttcacgatctcctcagtagttgtttcgataacctcttcgttgttgttcatgatttcgttgttctccataatatgttctcctttcagatttgaaatatgtggttcttccataatagtgtttgtaaattctgcgaaccttacattaagttgcggaagtcgtatcttggaccatatccatagtcgataacaagacaaggtgttccgtccgtagcaagctgagaactgaatctcagatcgatatatccattatcaatattccagccaagatcatcaccaagcttgataggctctaatccaacctcataatagaaatcattaagtgaaatatacatttcatctcgcatttgacgatttaattcattctcggcctttttcaatttgtcgatgtctgacttaaaatatcttccggacacagcatcaaaacataaagtatcgccttttgctgtgacgatgacctccttattttcaacaggatttttctcaaggcgttccttagcaaccgcgtccctcacagtctgttcctttttctcgccgattgtctctactacctttttttgataatctctcaacgttgattcggaaatggtgtacgctgcggtcagtgccgcatttcttctggcattaacggaacttgccccgataagacaagctactgatactgttccagtaactgccgcgggaatataacatttccaagcagttttaacgacgtccatcggctccagtttatctgcctgctgacgtcgcttttcctcatccaataattggattgctttaggagtagctcgtactgccattacggtagtcgtaatcattccggcaattccaactccagtgaggatttcaggactatgctttactgtagctgtttttacatttctacagatcttagtcaaattaggtttctgcatttcagtctatcctccataaaatataaacggggcacaaggccccgcgatttatctaaccaaccagaattccggacgaaccccaccagagcccgaagcgccggaggaggtcgtaaagccaaggtagcccacaatggcaaagtaagccgaagaaaattcctttttagtagcattgcggagccagccgaactcacaatcgtttttgtaataagcaacgcggtttcttctctgtttcataagaggaagctgctcatcgccatccgcttcgatgtgatctcgatcccatttatcggcccagccacaaatctctccgagagtcgggattgataaaccggtcattctctgcttaagaaccgcagggaacatattgtacagctcgctatcgatccactttttcagatcggactgagaatatccgccagcattgccaccatcttcattcatcgggcgtttggcaacataatcgtcgaaaatgaatagcaccttattgttcgtaactttctgaactgttgctgtaaagtttccgagctttcctaaaggaaccatcattttatcgccaactttaatgtctgctggaaggatagaatacggattatgtaccgtatctctaaataaattcaaggtcgcctcaacatcagctctgcaatagcgaactgtatcgccaatatcaaatgtcggaaataacggtcccaaatcgatcgcataacaaccctctgattttcccttttcgtcaagatcgatgtactttctatacatcctctctaccgtcggaacatcgatgcctcttttggttaagttgataatttcttctcctaatgtcatttctcttgtacacatagtacgttctcctttcagaatataaaatttttatttggtaactacgaaattagcaggtcaataatccactcaagcatatctttcgcacaagaaaaaacataacttgttcgtggattcacacatgaatatgaatcacattcatctcgaaatgattcaatcacgatcagcggtggtatctctgggtgtttgcagagtcgtattaacacttctcttccagcccatctcatataactcgcctgctcaaagttatatccacgctgaaccacgggcattattgcgatagcataacgtacagtataaatggctctttcagtcggcgattccatttgtctcctccaaaagaaaaagcgaaagagccttgttaggactcctccgcttcatctttgtctctccgggcaagtgcttcactgaccttttcttcaattttctcatccattttctgttcattcacccaatcggtaataaggtttacgcctacaccaatcacggttgctgctactccaatagccttaatccatttacttttattgctcataatgacactctcctttcataatacagcttgtaatttctgcgaatgaccagatttattcagaatcccagccggcatccggaacccaatccatatcgataaccaatacttcaagtccatcatccagtgttactttggaatggttaaaatcgatccagtatattcctgtatcaatactccatccaaccgtatctcctccttctaaaggctcaagaccaagcagttgataaaaatgattcgccggtaaatatccgctgataacaaaatcacggttcaaatgatattccgcctgaataactctgttgatggaactttcgaaatatcgattggaataggcatcgtagaataacctttcgtcattcggatcatgctcatcaaaatcaagtgaactgtttctaactaatccagttgaagtaatatacacgtccttagccttttccgctgcgatagcatcaactatcttctggtgagcctcttcgccgtacaattcctttagcttatccttatagttgttataggaatcattcagcaacgcataagcgctggtaagtgctgcctgttggcgtttactcaacacattggcaccgaagatgcagaatatcgttgccgtaccgctaattgctgccggaatatagcagacccatgctgatttaacagcttcaagtttgctataagcctctggatcaccgtcgtgatttgtcttactatccgctctgattttacgaagagcttttggtgtcgcacgtacagctaataccgacgttacgataaccccagccgcaccaagaccagacaatattgtcggtgatgcttttctcagatagattttcgacctctgagcgagtctttgaagatttggtttcttcatcatgttctcctttcgtttttatttcatagcatgtaataaatctaggacatctgtggatatgtccgctgctactgaaaacataaaattgttatccggattgatttttgaaaactgattcattattcgccggaagtcaccaacaaatgtgatgaaatcttcaaccgatccagatttctttggataaagtctaccgacgatgtatcttttcaactcatcaatagcccataccgaatagctcgatttttcaagctctttcttccatttccaaccgaatggaaaccacgcatccatctgatacgtatcgcataacaataagtcaagttgttcgatagacatccgttctctcctttctgcaaaaaataaaagagaaacaggatggactcgaaccatcgacttcgggactttaatcgtctcgcgctctaccaactgagctactgtctctcataatatgccttgtaaattttgcgaagtaaaaggaaagaggcgttgtatgcgcccctctcggttaatttaaaccaatgctcttcaagatactcatcagctcgtctttatcgagttctgcatctacatccaggtgaagatgagtctttccatcgtttatagtagtaatagcctcgttcaactgaatatcaatgttgtatcccgttttcttacgtattaccatctttattgctttggaaatgattcctctcgtgaatttcgatactattctcatttcatccatgctccttttactcctttcaaagcttcagtttttcataaaaggaactgttattttggcgaaaaagaagagacgttgttagcgtctccgtctcttttgggtatgtaactcataaattcccaaggtcaatacaatggttgctattactatacctacgatggcaacaatcataccaacagcactccaaaatatccacgccgtcaaagctccgataatactaatcagtaaaatcgaactagccgtagcgaaatacttaagaacaccaatcgcataatcagttacttttccgatagatacataagtttcaatcatttttctttctcctttatgtgaaattatttagttccttttccataaaagtctttgtaaaaaatgcgctcaaatctcacgtctatcgaaacacgtttcccatcgctgacgctgtattggtttcatttttaacgcccacattatttgtcttatagtgaccgttggatataatccttccgtacactctccggatcggctgtcgaaatattccttgaattttggatgtaaatataaagagtctgtcagccatgaatcgacctctgtccaatatgtactttttgtatctgcactaaatcgctgctggatcactgccagacctttattccctatcgtaaatagagtgcagcgatcatacacaggatgattacaaatgtaaagttcgccgtacattgacaaataaatgtctggcttttgataatggtaccgcatttctatctcctcatagcaaaaagaaaagagccttagatttctctaagaccctctcccacttagcttatgtttttaatcgtctgaatcttcctcggaatcatcattcgcaatgcccaatacttcttctctggttgggtataagttctcatattcttcattgccttcgcggccgtaatcatctaaatctatactgtggccgcagtggggacacaccagcgtatcttcccactcatcctcgaactccattaaatgcccacactcatgacagatatactctctgctgaacattgctttaatttgctcctcgttaaaaatactcatagctaaatatctcctttcgtactgtccagctcccatacatatagtatacaagctgttgtctgtagttcaagagataaagctttattctctcataatagcccttgcatttttcacgagaaaaaacgaagaggacatgcgttacacacgtccccaacgtttcagaatttcctctctacttctttgtaggtctaaaacggttgattaaccctttgaatgttgaagatgtgaaggttccagtttcttcaaacttaaatcctttattcatccagatgccataacacatcaacggaatcaataattctgccgctgcaataccaactctgaaatatcgatccttaacctgctctgcgatctgccgctctttgaagtcgccatctttcgtaacagactcttcgtccatcatacgccgattgtacttctcatcagcatcccacacactcttgttctcttcgattctcagcttgtaaagctttgtcagatcatcaatcgctgttgatttttctttgcttccggactgcaaatcagataaagcctcaatctgtgctgcaatctcctcacttaataattcttcgatgtttttctcttccatttcgttctcctttcaaataattattaggttcattccataatagagagtgttatttgtgcgaaatataatttttcagctccactcgcaaacgtacgtaacgctgcttataaattgcatccgcgccagaccgatctaattcgagaaataaataaggtccgctatctggatctgattcatcgaccctaagcgaaccaaccggtttttccctgaatataaatcgagacaataacactccacccattattccgatcagtaatccaatcatcaagctcacttctgctcctccttccaaaatgtttttctgaaaaataccacccggcaatttttcaaatatcaaaataacatgtttcacggtaacctacgtacggtatctaacctaggataaaaagaaagagccattgctggctcaatctttaaaagttttcaagtattttgtaggtaaatattcttgttttcttaagttcattcaataccttaattgcattggaataattactttcgccctctgtccaccaaatagtccagcctttcaaacgagccaaaacatatcgaagtccgaaatacttcaaagttgttttgctccaaaccaactgatataaatgtggaacgaaatatccagttttagctccttctgcgcctttaattgcgataaacttacacatatcaattccctcctaaaatatattcttttcataaagggagttgtaattattgcgtgttctcaccttcgtacaccgttttcttccgaagatcagaccatgtaatataacggtccttcttgcatactgggcaaaagaatttgctaatcttcccaccgatatcctcaaattccttactttcgccctcaagtcggctctggcaatttggacagttgaaccggtataccttcttcacagctttatcgacaatcttcatatcatttccgctccttgttaagtaaccagaaaaatcgtctgtacaattcgtagtaaacatccttgcagcatggaatttctaatctagctttgagaatgtcataggaccatccctctgttacagcttttaaaatatactccgccagttctcgatcagtctgctctgcgactctctcgaccatatctgtacgctcagaataatatgtcttagccatggcgcattttgcagtcggatcaccaagcgtactggttactacgaacgatgccaaatctttcggcggattagagtacccatcaagaaccgaataagcttttctccagattggatactgaagacagaaatgtttaagctcgtaataacggtgcttctctatccaataaggattcttttcggatagctccggacgtattgttgttcccattagcgcttctcccctttccacacataaccagtctcctcgtacaagcgcttcggtgaaatataaaaattgatacgtccgtacttagaattcatgtcctcaatttttgtcactaactgaccattccttgtggcttttccgattggcaaccatccagatataataccggccctaacccatgacgcgtctttgccgtaaattcgtgccgcaaccattaccggaaccgagccagttgcaaattcattttcattcattggctgctacctcctttcaacggctattctaggttaggaacagcatttagtaaaaacaacctcggtggatatgagcaaaaagaaagaggctttgctaagcccctgttctcattttgttaaaccgtagtttctgtaaccgaatacgcattacagtcaattcctttccgatgttttcctgctgacgataatccttacttctcaaaagcatatcctcgaaaaatcgaattttattcagcagatgtctttcttctacactcatatcgcacctccgtaaatatgtattctattcataaaagcagttgcgatttatgcgccttccaacgtatcatagtcatctcacatggataatcttcatatccaaaagtctcgcaagtgatcagtccctctataacaccggctattatttccgattcgtattgcttgtatgggtaaatataatctgggagataccgatgtatacatccgcattcggagcattgatacctcggaacattcacccatttgctcacacgacctttcgtccgtacaattcttctaactttgtcatagtatttcaattttccaccgcagtcctggcaggttgatgtattgttactgatcatatacctaaccctttctatcctaggttaaaatataaaaatttagtgtaggagttgacaattcctacactatgatatatgattactaacgataaatcaacaatccaacataaaatctcggttcattatcatgaggagggatttaatatgctgatacaatgcccggagtgcgacttacaggtaagcgataaagcaaatacctgtccgcattgtggatacccgctgaaaccagacgcaaagcccaaatcgtctcgtaaaccaaataagcgcaggcggcttccaaacggtttcggtcaaataagtgagattaaaggtagaaatttaaggaaccctttccgtgcaatggttacggttggaaaggacaagaatggcaaaccaatatgtaagccgttgaaaccggagtcatactttccaacatacaatgatgcatacacagctcttgtggaatttaataagaatccgtatgacctggaaccgtctatcacagtcaaggaactgtacgacaaatggacaccggaatatttcaagactctgaagagtgacgacagcgccagagctactacatcggcttggcaatactgctctgctgtttacgatatgcgagtcatggatgttcgagcaaggcacataaaaggctgcatggaagaaggtgttgctaccgtaagaggccaagagcagacaccaagcgcatcaatgaagaataagataaagacgctcttcaatcagatgctcgactatgctgttgaatacgaacttgtagatcggaactattcgagaacattcaagcttacagacgataccattaaagaaatacagactgtcaagaaagaacacattccattctctgatgatgagatggctcttctgtggaagaatctcggacataaatatgggattgagttcatgattattcaatgctattctggatggagaccccaggagttaggtctgatagaattagcagatgttgatttatcgaactggacatttaaaggtggaattaaaaccgatgctggtgaaaacagagttgtaccgattcatcctcggataagggacttggtttccaaatcatacgaagaggctgatcaacttgggagcaaatatcttttcaattatacagatgaagatcgccgcggtaaaaataccaagttgacatacaatcggtatagcaaaatattcaatcgcattcgggacgagcttaaactcaacccggatcatagacctcacgacggcagaaagcatttcgtaaccaaatgcaaagatgctaaagtcgatgaatacgctatcaaatatatggtcggacataagatttcagatatcaccgaaaaggtgtatacagccagagaatttgaatggctcagaactgaaatagaaaaaataaaatgacttgtatttgacgctcaaatataggaatagcggtataggagtagtgcaggaataatgtatgaattacctacattttcccactttttactactcttaaccgcttcataattccttgattttactggattttctcggtataagccacctaacaagtttctattaatagaaatagcagacagcaattccttctccagagcggcaaaaaacctttatgtatctcagtcaaccttgtcaaccgctgtgcaggatgtagaacagagtctgggcatacgcctttttcaccggagcaacagaggagtaactcttacctttgacggagaagattttatcaggtatgcacgagagatagtagaaaaatctgagtatttggaaaatcgatatcagacgaaaaatcttctgctcatgcatttttccgtctcctgtcagcacttgccctttgcggtaagagcttttaataaaatgctgaatgaattagaactatccaattttgatttcgccatacgggaatgcaatacagcttccgttatacacgacgtagcatcggcaagaagcgagattggtattctttcctccacagaagatcacctggaagcgctgagaaagaatctttcttcctatgatctggactatacccagcttgcagtacttccctgttacatatttattcggtcaaaacatcctctggctcacaaaaaacatctctccttaaaagatatggaaaccttcccctttgtcacctatgaccaggaaaacagccactctcatttaacagaagaaatactattctacaatatactcagtagaaatattcatgtaagcgatcgctgtacaaagatagccttaatccggaataccgactgcttcagcataggatccgatttaacaaacagcaatgcagatgcatttcacaaaggtctgggggaaatcatcccaatccctttggaagaaccacttgggttccttcatgcaggatatatcacaaaaaagcaatatcccttaagccagaccggcatctcctatctggagcacctgagacatgaaattgcagccttatagtataatttgggacgtaatttgggacgtgttccttttagaaagaacacgtcccaaattaggatcagggtgtccctttttcggactgacctgtcccctttttataacctatctcgtctttgtccacaccccagactgattaacgtaatatttgcctatccaggcctcttccagcattgccccatctgattggagatagtaccatttattccgatcttcaatccatccggttgccattgctccactgcctttcagataataccaggttcttccttcctgaaaccagcctgttaccattactccattgtcctttaaatagtaccaggtattcccgttgtataaccatccagttgccatcgctccgctgcttttcaggtagtaccagatactgccttcctgcagccatccggttgccatggcaccactgttttttaggtaataccaggttcttccatcctgataccacccggttaccatttttccattgtcttttagataataccaggtattcccatccagcagccagccagtggccatcgctccactagatttcatgtaataccatgtattctcttctaataaccagccagtagccattaccccattttcattcagataataccagcttcttccctgctgcaaccagccagtggctctgtatccatcctgttttaagtaataccattcattgtcgataaatttccattgagatacgtagtagcccccatctgctgtataatatctccatccccagggatcctgcctccaaccacccagttcctcttgttctgacaaagtctctgtcttacccccaaagtcttcagctgcattcatatcctgcgctaaagcagtccttgaatacattgccatccacagagctgctaaaagtacaaaaaggaccggttggatttttttaacattctttctcattttatcctctccttgtagattaataatatctaacgtcacaaaagttatcctcaatctgtgcaatggaaagtccgatatcagcgaagacatatcgaatcaatcaggattgcggaagaatatgacttaaatatcttataattatatcattttacttacttatgctcaatctaaaaggattttcaaaaatgcaccctgttcaaatagaatctttgctactttataaacccaaacacattcagcagcacaatcactaatatcaccggacagattacacaggcagaaaatttatcataccaggttatttttccatcccttccatcttgcagaagctctttcccgtaccgctccatcccccaaactttaaccgtgaaaaagcagataagcaggcagcccaaaggcattaaaaaatatccggtaaagcagtccagccagtcataaaaatcatacatctgaatccccgtggcaaacggccagggcagctttgcattttttaataccccgaaaccaagagagacaaaaatacttaaaaaatatactacactggaagttatgacaagcgcttttttatgggttgtcttcaaaacctcctgtacatataccgtaggtatttctattaccgtgacatatgtagaaatcaccgcaaaaaacagcgctgcaaaaaacaatgttcccacggcccttccccccggaagattgccgaatatcatagtcatcgcctcaaacactaaggctttgcctgaagtcatctccataccgctgccaaccactgatggtattaccaaaagccctgccacaaaagcaaccaaggtatcacaaaagatcaccatgagagaatccttctttatattatgagattctggtatactggcccccagcgtggaataaatcccgcaccctatccccaccgaaaacattacctgagagcagacatcggcaaatactttccaggtaaagttatgaaaatccggtaccaggtaatacctcagtcccttagccgcccctggtatcttaatcaatgcccacacggcacaggcgagcagaataaaaagcaaagccggcatgataaccttagaaaccttttccaccagctgagtaattccgctgaataacagaaacactaccagaaccataacaatcccggcataaatattaggtgagacggatttttcaatatgtcggtcaaaaaatgcactgggatccgtcccaaaatcaactccggttgcaaatgccacaagatacttaagcacccatccgctgacaacaatataaaatacacccacaaagaactcacagaatatattgacagcacctacaaaacggaattttttattaacacttccgtagtccgcggccgcgttagacttgccatagcggcccacagtactctccatctttactataggatatccaaacaccaccgacaggataatatacgccaccagaaaagcgccccctcctcctgcataggcgagataaggaaatctccatatatttccaagtcctatggctgcgccagccgcaaccataatatagccaaaactattgccccactgagccttcgtatgctccggattactctccaatttagtttctctcatagatccttctccttttttcggattaaaagatgctggccggctttctatattaagcgctttctatatcaagttttacatcttctgcttttttgcactttttggacattctgataatcataaaagccgctccaattccgattaccagaactattgtctgaaatacaaacatatacgtataggcagtctttccatagttatccagccaatgcccaaacagcgtaaactgaaacaaatccggggagaatcctaaagctgctgcaattccaatagtagatgcggtatactccctggcaactccagcttcagtaatcgtagcataataggcacctctccctacatatacaattcctgaaagcacgatggttagagtgataagaaccactgcatttaccccagtttttgcattcagcagatagacgaaccctaagatacctacaatatacacgcctatcagtaccttagaaggggacttaattttgtctgtaagccatcctcccaccggtgctccaataagagtcataccatgctgtctcaaaatcgctacccatccggtgaacactacggtaacccccagtacatctgtaaaataaggggtaaagtatgacatagtagttaaaaatgagtacactgcaaagatactgatcccaaccagccatgtagcaggattcttaataatcacaagaaaatcttttcccagattccctttcggtgcctcagccggggatacttctgcctgaggcaccttcttctttttcgggttatccagaacaaaggccacaatagcagtgagaacaaaggaaagaattccgattccaataatagctgccttcatgcctgccacgccttccaaaaatttaacatagatagccatcataatagcattaaagataatattaaacagtccgatcatagattcattgataccgaaaaccttcccctggttctcgtccgtagccagctcccgcacaatctttatgtgagtggggtaattcataaacagactggacactgcgaatccgatccagcagataactgccattacatagttcgggctgattacaaaaattaaagacagcacaccatttaaaaacacagatgcaacatacacatatttataattgaatcggtcggcaacccatccgccgataggtgcgccaaatatattaccgaaaccatagatggtcagaagcagtcccatctgtacattcgttgccccaagaaaatcctggaacggattataccaaatatactgaataaacggcacaatataaacaattgaccagcaggcccccagaactaccagggtgaaaagtactttaacagataactttttttccaattttcgctcctcctcttctacttggcagctgccagacaggccaaggcaatagaattgattttaatttccggtgtgtctgaacgggatccaagaatcacaggggctgccgcacctaatacaattccggcccattttgcctgattaaaatgcagccaggatttccccataatatttcccgcctctatattagggaagatcagcaaatctacatcccccgctattttactctgaatgcccttgtgttctgccgcagctttgtcaaaagcgatgtcaaaagaaatagggccctccggaatacagggaggaatttctccctttgcagccatctctgttaaagctgcagcctctactgtggaaatcacttttggatccagcatctcattggctgttagaatggctgtcttaggccgttccagtccaaacttcttcattgcctccagggcattggtcataatcacttttttttgttccagatccggcgccacattaatcccgctgtctgatgcatagataagcttgtgatactgcggcagctgataaactgctagaaggcttaaaagccgcccggtccgcagcccatattctttgttcagaattcctctcatataaaccgcggtatttacaagccctttcataagaacatctgcctcccggttatgtaccatagttacggccttcaccagagattcttcctcgctgctgcatcctacaatctcataattcttaaaacctatttcttctcccactgccgctatctttttttcatctcccacgagaataggattgataaatcccatctctgccgcatccctgacggctgtcataaccgcccggtcctctgcaactgctacacatacctttctgggatctgtccgcttcacctgatccagcaggtcatcaaaattcttaagcatattctcctccattcctgatccttacagatactctttcgcctcttcttcatgattcagtactcttagagctcccagcgccagcgcttccatctccatctccccgggaaccacttcaatgggcgccaggtaagagattctatcagaaacctctgacacgactttctgagaatatgcaattcctccggtaaaaataattctgtctacctttcctttcaggcttgctccatagagggcaatctcctttgctacctgataggtaaatgcccggaaaataaggctggctttttcatccccgctctctgccattttctctacctcttccatatccttggttcccaggtagtcatacattcctccgcatgagctaaccttccggaccatctcttcccgcgtatatctgccggaatagcatagttcgatcagctgataggtcaggaggccgccgctgcgctccggtgagaaaggtccgtctgtacgcccaccgctgccatctatcattctgcctttttcgtgggcaacaatagagattcctgaccccagatgggccacgataaagttaaagtcctcatatctcccgcccattttctccgctgtctttcttgccactgctttgtggttcagggcgtggaaccagcttttcttctcaagatctgacattcctgttatccttgcaacatcctgcatctcatccacagcaacgggatctaccacaaaggaaggtgctcctatggcatccccgatattccgtgcaattactgctcccagattcgaggcgtgctctccgtttacagcgttctttaagtcctctaccatacggtcattcacccggtaggtgcctcccggaacgggacgcataagacctcctctgcctaccacacaggcaaaggaatctaagggatgacccgcttcttccagtattctagtgatgatacctgtccggtattcatattcatcaaaaaccgtaggaaatggctgtaaatcctctcccgtatgctttatgtttctcttcagaatttcctgcctgccttcaaagacagaaaatttagtagaggaacctccgggattaattactaaaatcttcatgttccatcctcacttctcagtacatacttttgattatggatgttctagtgaatggaacatagttctattattgttcagtgtagcacctcttctttcccggtgtcaattcttttctgtctcctttgctgactttcatgattttgcacaaaaataaagcatgctctctggtaattaaaccaaaggcatgctatattcttccttacctcaaactgttggaaatttcccgggtaacctggcagagtctgtctatttttctctggaaggtctcatccttaattctgctggttggaccagatagacttatggcagctactgcatactgtccgtttttgaaaataggagctcctatacaggtaagtcccatttcccgctcttcatcgtcaactgcaaacccctggagtcttaccttctccagttccttttccagttcctttcttgtcactatggtgtgttccgtatactttatcataggccgctgatcatagattgagagatcaatgttctcactgaatgccaaaaggcatttgcctactgccgcacagtgacagtcattgcgggatcccacctcggagttgaacctgagaatctgattgttttcctccttgtatatcatgacgctccgataaatatccttctcatttctttcaagaattgaaacatttaccgcttcattaaactcatcatgaagtgctttggcatacggcttaaccagcttttgaattcctattttttctccaatgctggtacccataatgtacagacggattccaagagaatacttttctgtctccggattttttgtcacaaatccctttgcctctaatgttgccagagttctgaatacagtacttttatagactcccatgtcttcactaattttagttatggacacctcagtgcccgcattatacatataaatcagcatgtccagcgcccgatccaccgcatttatgatattcatatctgtcataaaatcacctccctccatcctgcagctttttcgtcacttatctttgacactaccacaaagcatattaaatttcaattattttttctgtatctaaatttttatgctcaatggctatccctgtgtttttgtgcactttatacataaaaacaatttattattaaccacatttcataattttaacaaaatgatattgacaaaataaagattgagtgggtataatgcagttgattatggaacacagttctagtgtttggaacaaagctatgaaactaacaaaggaaacttttaggaggtatttcaatgaaagttacagtgaaatcggccagatgcaaggaatgcggactctgctattccttctgtccgaaagaagccatcagcttttcccaggataccaatgcttcaggctaccatcctgtcatggtagatgatgaaaaatgcattggctgcggaacctgttatataacatgtccggatggcgtctttcacgttttgcagagcggaagggggagtttataaatggcagaaatgatgaagggaaatgtggctatagctgaagctgccgtccgggcaggtgtccggttctatgcaggttatcccattaccccatccagtgaaattatggaatatttgtcctggcgtctctctgaagtcggaggatcgtttgtccaggcagagagtgaacttgcaggaattaatatggtgtttggagcttccagctgcggagtcagggccatgactgcctcttctgggcctggtatcagcctgaaacaagaaggcatctctgctctctctgatgaggagcttcccgcacttgtgatcaacatggtacgttacggaaacggcctgggaactctgttttcctcccagtgcgattaccaccgggaaactcacgggggcggacatggagattaccggtgcatcgtactttctccgtccagtattcaggaggcagtggatctgatccccacagcatatgaactgggagagaaataccgggtagtcgtagtactgatgtccgaaggagctctcgggcagatgatggaaccagttgaacttcccgaatttttggaaccaaaaaagaattactggggttttgatggaaagtattcttataaaaaaattggaatttttgacagagactctatgaaagaggctgtggagctaaacaaaaaatacgcagagataaaagaaaatgaacagcgttgggaatccgaggggttggaagatgccgactatgtattcgtggcgtatggtctgcccggcagaagtacgctgggagccgtccggagtctgagagagcaggggtataaagtgggtcttatccggccaattaccacatggcctttccctgagaatgcattccgggaggtgaatccaaaggtaaaagcaatgatcactgtggaggcaaatgcaaccggacagctggtggacgatgttgctctctacacaaaaaaaataataaagagcgatgtacctgtatatgcgcttccatttgtctacggtgtgccccccatgaaggagatccagaataaattccggcagattcttgccggtgagataaaggaggtatactgatatgccagcagaaagaaaagtgccggagatgatagaccggcccatgagcttttgtccaggctgcggacatggtatcattatccgcctgatttgtgagtgtctggaagaactggggcaggaccagaatgtaattttccccataggggtaggatgttcctccaatctgggaggaggactagtggcagatcggcttcactgtctgcacgggagagcaggagcagtcgccacaggtatcaaaagagtgaatcccgataaccttgtaatcacgtatcagggagacggagatgcctacagtataggtattgccgagaccaccaatgcggcttaccgcaacgaaaatataacagtaataacagtaaacaataccaattttggtatgaccggagggcagatgagcctgactaccatggaagggcaaaagacttcaaccactgttcatggacgtgattgttctgtcactggctttcccatccgttttcctgaactggttgcttcccagtttcaccctgcctatgtggccagaggttctgtcagcagccccgccaacattaaaaagacaaaagggtacataaagaaagcactccaggctcagatgaacggggaaggatattccatggtggaaatcatgtctccatgtcctgtaaactggggaatgaagcctattcaggctatggaacggattaataatgatctgatctcttactatcctctgggagaatttacggaaaaaggaggagaaaccaaatgaaagaagtagtatgtgccgggtccggaggacagggcgtccttacctgcgggcttattctgtcagatattgccgtaagagaaggacagaatgccacatggtgtccatcctatggatctgccatgcgggggggaaccgccaattgcacagtaaaattcggcaaagatattatttataatcctcagcaggaagaaccagacgtccttattgttatgaacaacccttcctttgagatgtttattaaaattgttgcgccaaatgggctggcagtggttggggatatggttacctgcgataccacagtgcgccctgatgtaaccattgttaaggttccctgctctgccatagcggatgaactcggaaatgcaagaagtgccaacattgtcatgaccggcgctgctgttaaagctatgggcgatttctcaaaagaggaagccattgctgccatgaacgcaatgtttgctaaaaagggaaaaagtaaatttgaggaagctaacaagaaggctttcgaggctggatatgccgccgtgtaactaaccctgcagaaggcatattagtaaaaatgacgaaaattaaaaatagaacattgttccatttttaattataaaacatcctttttcttcaataaattttataagttttgcactaatattagatattacttctaatattttgcacaatacagtcttgattttaaaattgtataataaaaatttttgtgaaaaatgcaagcaaaaatttctttgacattttaaaagggctgtggtactttaaagaaaaggatgttgtctgttccgtaaaaagagcaggacatacatcctttttttaacaaaatgagaaatcatgcgcatgattccataaaagtataagggtgtgtaggaaaacaaattaaggaggatttttgaatggaaaaaagaagtttattctatccattggaccaggaagatttgacaacattacgtcttcagtatgactggaaaaccggtaatgtatttcttcaggcatctaaagactgggatcctgatttagactggtcaaagtacaaccacgatttctacgtagaaagcattaaaacacacaatgcaaaatttttaaatgacgtagagacaagagctatgtttgagaaatacggtttaaccgattatctggaagaggttatcgaccttttaagacagggaaaacatttcggtattgactgtttctatcacaaaggatttgacattaagtatctgggcaacatgcataacagaaaacgcggtatcaataatacccgtcacggtgtgatgaaaggcggtatccgccgccacgaaaaagatgagaacgagttagatatcatcatcgacggcctgaacctcggaagagcaatgtcctttaaaaatattgcaggtgagcttcccgtaggcggatgcaaatcttgcgttattatggatgaactggatctcacagatatgaacgtatgcggtttcctgggcttctgtctggatgaaatccgctgctctacaggacctgatatgggattccctcctgccatgaccgatgttatgaaagaaaatggcttcagcgttcagtatacctgcggaccacggggtcctctgggatcctcaggaccgccgacagcttacggagtattcatttctctggaacaggcagtacgcttcctcaacggcagcgaagatatgacaggaatgtccttcgccgttcagggtcttggagaagtaggcgccgctatggtaggatgcattgccaagtttgtcaaaaatcctaaaatctatgttgcagatatcaaccagcagcgtgtagatgagattgttgctaaatacaaagaacagggaatcgatatctctcctgcatccacagatgagatcctttacctggatgttgacgtagtttctccatgtgctatgggtgctgtgctcaacgaagaaagcattcctaaacttaactgcaaaatcatctggggttctgccaataaccagatcaaagcaagcagcgtagaagaagaatgccgtctggcaaaagtaattgctgacagaggaatcctcttccagacagactggtggcacaataccgccggcgtaatgtttggctatgaagaatacaaatatcagaaggatgccagcctcgagcgtacttatgcagacatcaaacgagtacttcccaaaaacacctgggagaacttaaacaaagccaaagaacttggtattactcctaccgaatccgcttacaaaacatgtaatgatgaattatacggtgcataaaagcattcggtcataatatctgccgcagggcggccggcagaaaactctccaaaataattaccagccgcccgccagttatcttcttttttaatagtcaaatgctacaggaaaagcagagttcacaggtaacaaaaatttctcctattgtgttaattagaaaaagttctgtatatgaaaagagtgattactatgaatgctaaatcgaaagtcaatatattagcaattgccaccgttatcctctgggcctctgcttttccattttcaaaagttgccatggagcacttttcacctaattccttaggatgcctgcgtatcaccgcagcttccatatttcttatcctgctgggaatattcagccggctgcatctgcccaggaaaaaagacatctacaaattcttcctctcaggtgcacttggttttactttatatatgctgaccttcaacgtagggatacggaccttaacgtcagcaacctcaagcatcattatggccatgaccccggtaatgaccgccgtaggcgcactctttatctaccgggaaaaaatacctgccataggctggatctccattggaattgaattcatcggtattctggttcttactttgtgggacggagtactttccataaatgtcggaattctctggaccctgagtactgccatactcttctgtgggtataatctataccagagaaaactgctctcccagggatatacccctttagagataaccatattcagtatcaccgcaggagcaatcttattccttccgttcttgccaaacggaatccatgaaatgtccaaagctccgctttcccatattctggtggtcatatacctgggagtctttcccaatgccatagctgcattcacttggggaaaagccttactaattgccaaaaaaacaagcgatgtaaccaattttatgtttgtaaccccattactggcaaccataatgggatttgtagttttgaaagaatcaccatctgccgggaccattgcaggggggatcatcatactggtaggactccggctatttcaaaaaaagcaaaaggggacgtgttcttcctagaaggtacacgtcccaaaatcgatcaggggtgtcccatttccaaactgccctgtccctttttctatttaatcaaagcggaagcttataatatcatcatcagatatgcatcctgcttcattactgcaaaccccaaaaagagccaaaaacataatgtttttggctctctaagcgttcccgagaggatttgaacctccgacccctcgcttaggaggcgagtgctctatccagctgagctacgagaacataaaaatctcactaaataattttaccaaaataaaaggaaaaagtcaaatcttacttacaaagaaatacaaagaaaaaattcaaagagactcttgcggccgccgcattttccagtacttaatgcagcggccacaggatttatttaatctctgctgtctctataataaatttaacattaccatccatttgatccgagatgcctgagaatgattgatacctctctccttcatccataactgcatcgatacgatcttttaatgtctgaatatctccatcaaacacttctgatagtttctgaataccagtctcatcaaactctttcattccatccgccaaatctctggatccatccgccagctgtttgacaccagaggtcagctgttcacttccatccatcagtcggctgcctccattctgcagtgtatttgtgcccgaggacagagcttgcgcaccgttgtttaaggcactgttatttcctgtcagttcttttacaccgctgattaaatcgcctgatcccgcaagcaaatccgatgctcctttattaagctccccattataggaagaaagctcatctgccccggatttcagactgttgatgcccgttctcaatgatcctgccgatgcattcagagtattgcttccctctgcaaccttatccattatattcttcatagccttactgccttcaacaactgattctatgccggaatgcacgcttgccgcaccctgataaagatcgctgttttccccggtagcctcaaccaactgatgaatatagcccttcagggtatccagatccgaagttcccgaagtacctcctgctgcactctgaagttgtgttaacaggattgtttcagtatctacattctcctgcagcctgtgaatacagtcttctaactgtccataataagcctggaaggtatcacctaaaccagccctgtctgccaatcctttataatcaccggccacatcctgtacgcccttaagtatttctaaaacagcactgtcgtttgttagagaggtcttaacaccagacacaacagaacgcagcagtgtctgcacatctgcagccgaagcgccggaatccaaaacggattcaatagcttttagcgtactgttaaccgttccaatcccctctgcaacagaagagcttccctgcagtaaagcctgggttttctgttcatctgtaagagagtccagaccagactttaccccctggatcccttgattcagattacttacagctccaggcagttcctttgtcccagcggccagttcttctacccccgatgcaagactttcctctcctgcagtataagtccggattccctctgcaagctgggatgcccctgcagtataggcggtgaccccgcctgcaagtgctgctgcccctgcagtataatctccaactccggaagcaagcgcttctgctccatcatgaagttccccaattccgctgtttaaagtatggatcccatctccgaactctccagtcttatcctgcagagcggaaataccatccttaagcgtcccggaaccatctaccagccggttagaagcgtctgacagctctttcatagaatcctgtaaatcttcaaagctgttaatatcatcaaaccccagttctccaagcatatcagaggatgctaaggtaagagtagggcccatagtaaaatcagtaacatctgctgttattgtcagggattccggaatcttaaaatctgtatcctctgtgtccggttcctttagatctaaactttgctttaaacctggaaaggcaactccaataacaatatctctgcttgcatcagagattacttttccatgatctatctgaacgttcgtaaaattatctgtgggaagaaacatccccgtgaccatcacaaaaggcgtatagacctccgtatccttatcctgtatttttacagtattcctggaatggttggtatactgaatattcatttccagactgcctgactttccggcaagctcctttacgtctacttcttttccatttaatttataagttatatttacacttacaggaagagatttctttgttttaccctgataatagatatccgttcccttagtcttccaggttaatttctgcccttctttttggaacttctcatcgcccttcacatttttaatatctgtcagctctgactgatcctccagctcatgtaccgttcctgcatttttcatccagtcagacacaataatctcttcaacatttccctcagcatcagcagtaacatatacagactcatcttttgacagtgtcccgcatggagctggggcactcttattcgctacctgctccgttatacttctcagctcctctgcctcctgggatgcttcttccttcttagctgcatctgctttctggctgtctgcaaacagatacgtgcatccaactactgctatcatacccaccgcagttactgcggctgccttttttctccatccttttttcataacaatccctcccacttattgaacgaaactttcatttgtttttaccttatgttttttcggaacaaatccaatagaagtcctgcagattacaggatccaagatcataaacatagcaggtagcacaaaaagtaccacaactgtacttataatagctcccctggacagcagtgtacagatggaacttatcatatcaatctttgaatacagtccgactccaaaagtagctgcaaaaaagctgcatccactgattaagatagatttcatggaagtcttatgagctatagaaatagcctctttcttagacctgccaagcccacgttccttctggtaacggctggtcatcaaaatagcataatccacggtagctcccaactgaatcgttccaattacaatactggctacaaaaggaagcgtaatcccactgtaatagggaatagccatatttacacaaatagcaaattcaataactgcaaccaggattaccggcagagaaattgatttgaataccagcagaataatcagaaaaatagctgcaaccgaagcaatattaacatttttcaaatccacatccgtaacatctgctagatcctttgtaaggggcgcctcaccgataaccatagattgaggactgtaagtcttaacgatcttatcaatctgagcaatctggttattcacctcatctgttgccgccttatagtcagagcaaacaaacgccacttcgtaatcatcactctgaagcatcttcctaacatcctcgggaataatagaagaaggaattccgggccctatgagagaatccatcccgatttcccatttcacaccgtcaactttatcgatggcttccagcatctccgttttttctttggcctccatgccatttttcataagtaccatatggaccgtattcatatggaaatcatcttccagcttggtgttcgcaactgcactggggagtgtagccgggagacatttgtctatgttatagtaaacctctgtatggctgttgccgtaaacagcaggaaacagcagaagaataaatattgccagccaggctttataatgtctggtaataaatccggatatcttatcaagattcggaataattgctttatgctttgtcttttctatggcattgtcaaaggtaagaatcatagcagggagcagagtaacacagcagattacaccgattactacccccttagccattacaataccgatatcccttcccaatgtaaatgtcataaagcacagagctgcaaaaccggcaatagttgttacagaacttccgacgacagatttaaaagtatttgagatggcatgagccatggccctctgtttatcattttcaaatcgtatcttattatcctcatagctgttcagaagaaagatggaatagtccatagtaacacccaactggagaatagcagtcagtgcctttgtcagataagatatctctccaagaaatatattgcttcccagattgtataaaatagcaaccccaattccggtaagaaataataccggaacaaccagggagtccatggtaagacacaaaaccaggagcgaaagaactgccgcgatcactacatagataggcatttcctgaagagacagattttttatatccgtcacaacaccggtcataccgctgataaagcactgttttcctactgtatttctcatagcacttactgcatccatagcttcatcagaagacgttgtattatcaaacagagcaaccatcatggtagcatccccattaaaaaagctttccttaagttcagagggaagcatttcaaccggaacactaatatccactgcactgtcataccagagtacatcctttacgtgatcaatttccttaatctcctcttttagtctccggacatccttcatctccatatcttccactacaaccatggaaaaagcacccattccaaattcatccaccagtatatcctgaccggaaactgtctccagtgaatcaggaagataactcagaatatcgtagttaattcgtgttttagatatccctatgagagaaggaataatcagcagaatcccgattaccataatcaatcttctgtgtcttgcaatccacttgccaattttgattgtcataataattgctcactcctctttttcaatgtctgcatcccctttaatcattttattaatgaccagtagtcatttatttatcaatactcgttatacatcaaaaatgaccagtagtcaatatattaaaattattttatataattttaatatattgacttttggtcattttgacctaataatataagatagaaatgggggaaacctatgaataaattagaagaaaacaaaaagaaaaagaaagatgcactgctgaatactgcttttgaactgtttatcaccaaaggccttcagaaaaccaccatatctgatattgtacagcaggcgggggtggcaaaaggaaccttttatctctattttacagacaaatacgatgtccggaataagctgatctcccataaggcaggaaaattgttctatgatgcacacgaagccttgtctggaacaggtatcactgattttgaagaacagcttctgtttattgtggactatatcattaaccagctgatagaaaaccagtctctgctccgttttatcgctaagaacctttcctggggggtattccgcaaggccattgacgttaaagtatccgatgaggaatataacgtatatgaagtatattacaaaatggtggaagacagcccaaagcactacaagaatcccgagttaatgctgtttactattgtagaactgattggaggaacctgctatagctgcattctctataaagatcccgtacccattgacgaatacaaaccgcatttgtatcggattataaaaagtataatgaacgattttgcacattaagacaggaagattagtactaacatttcccctctggtgaagcgggccaagtaagtgcctgtactactcttgtaataagagctgatgggaaaaacaaaatcatacaaaccattattgacttttatattaaaaacaagtatgatgaaatgaataattcattcatagaaaaggaaggtagcaatatgaaccaacgtatcaaatctattgttgaagcagcaacttatctttttttacagcaaggatatacaaaaacacagatcagtcatattgcaaaagctgtgggcgtatctgtgggtacgatatatcatgactttacaggaaaaaaagagattatgcacttaattttgaaatgtacatttgagccagattttatcaatcgggaatttgacagacctattactgatgatttgtttttaggtttggaaaatgatattatagcaatatttgagcagactggcaatgaatttgcaaaacaccttacaactaacgcagcagactacaatcttgaggcacttgtttctgacgcatttgatatgctttctcaatatgccgtgggctgcctgttcattgaaaaaaatcaatttgattttccgtttttagcagagcattacaagcaatacagaaaaagctttatggaaactatgacacaatatatggagacatttacgaaacggggtatagtacgcccccttaaacatattaatcttgctactaccatgattatagagattttatcatggtgggctatggacatacattatacttcctttgagacactagatatttctcccgtcactgccaaagagctatgcatggataatatcatatcagcgtatcagtacaaaaattagcagggcatcatcagccctctaatttttgctcactatttgaatgaataattcatttactatttagagaggaaaaaaataccatgaaaaaacaaaatattatctatattctactaaccttatgttatctaggcacactttcgggctgttctcactcacaaaatctaaaaataacaaatgaaatcaatttttctttgaaggagatatcagatataactatctcttacgacgaggaaccagtaatcttttatccggcgaagggtaatgaactaacgatcaaagaatatatgacaaagaacaggagaagctattatgctcatataaaacagaatggcaatagtatttatatcagcgagggcggcaagccattattcaaaggcagtttttcacgccgcattgaagtattcttgcctgcttcctacatggaatcccttacaattacaacaacagacggaacaattaacttaacagatgtgaacttaaacctttcaaaactacgcattgacagcacagcaggaacagtacgcatgaatcatgcaaccgcctccagtatttatttatctacaacaagcggatctttgaatttaaacagtctgaaagctgagaagatacgattagataccacaagcggaaatgttacctgcggcaagctgactggtaaagtggaatacacttccacaagtggaaatgcagagataaaatctgcagttggttctggcagctataaggcaaataattccgggcgtcttaatgttaattatgttgaagtaaacggagatttatatttttttaacaagaatgaaaacataaatcttaccttaccaaaaaatttatcgttcgattttgaagctatcacaaaaaatggctctgtttcaactacatttcaagagaatattaaggtcaacggccgtaccacaagtggtgttgtaggcagcaatcccacagtatccgtgaaggtggaaacaaaaaacggtaatattgaggtagaacaatgaaacaagaacttttttctgctgtgtaagaaatcacaggcaaaaaaaacagagagtataccactgtaaagtgatgaactctctgttttgttgcacttgttcgccagcccttaatattactttgttttcaatgtttccttataggcattcatccaaagatgttccctttttatgtcttattcattaaagttaatgtacccctgcagccagataacccctttaaaccgcctcccaggctgaggctctcctaacaggtcgtttttgttaatacaaacatcaaattgtatatcgttgcacaatatactcatctcatagactgtatcaccggttttaacatttttaacttcagaacagtctacaatatctcccataacattgtactggtcacattcaatgccatagggcataaaataagaatctactattgaatatacgtcttcttttacaatgcgcctggaaatcatagcatacatgtctatatcttccatcgtcaaactttccattgcatcttcatccccgttgcgggcagcagccagaagacggtttctgttagtagctgtttcctgattctcttttacctgaccggactccttctttacaggaagaagtatttttccttcctttgccaaacccgatatggttactgaataattggaaccgggaatatttccctttccccgctcactcaggtattctcctgcattctgcagataaaatatcattgttactccaattctcacatcatcacatgccccggcaaaggattcctttccggcatgcttttctataattatgtcttcccgggtagtgattcctgttcctctgaaatggggaaaataatattccatctgaaattcattattctcgtcatattcaccgcacaccgtaattccataatcacatccatatattttcgatatctctgcaaataagtgtccgtttctgtcctctacgaccgttttttcatcataattatctatcacttcttttaaaatctcatccagttctttcttatttttgatattcgaaaaaccaatggatttcatataactatgcaaaagaacacctcctctctcgccttacattctcttatatatactatatacaaataaacttgtgcatattttactaataacatttacataaaaatgttaacataactattttatctctgtttttccgcccatgtaaggctgaagtgccagaggaatcttaacggtaccatcctcctgaagattattttccagaaatgcaatcagcattctcgggggtgcaaccactgtgttgttcagtgtatgggcgaaatatttgcccttctctccgttcaccctaattttcagacggcgtgcctgagcgtctcccaagttggaacagcttcctacttcaaagtatttcttctgtcttggagaccatgcctcaacatctatagatttcaccttaagatccgccaggtcgccggaacagcattccagtgttctcaccggaatatccagtgttctgaataaatcaacggtgttctgccataacttctcaaaccacatcatactgtcttccggcttacaaaccacaatcatttcctgtttctcaaactgatgaatacggtatacgcccctttcctctaatccatgggcacctttttcttttctgaaacagggagaatagctggtaagtgtctggggtaatgtatcctccggcaaaatagtgtctataaattttccaatcatagaatgttcactggttcctataaggtacatatcttcgccctcaatcttatacatcatggcatccatttcagcaaagctcataactcctgttaccacatcacttctgatcataaaaggaggcacacaataagtgaatcctctgtcaatcataaaatcacgggcataagaaatcactgcggaatgaagcctggcgatatcccccataaggtaataaaatccattacccgcaacccttctggcactgtctaaatctatgccgttaaacttctccattatctccgtatggtatggaatatcgaaatcaggcactacaggctccccatacttctgaacctccacattttcggagtcgtcctttccaagaggcactgagggatcaataatgtttggtatcaccatcatgatctttttaattttttcttctacttctttttcttcctgtgaaagagaatcaattctatccccattgtctgctacctgtttttttatctcttcagcctcttcctttttcccctgggccataaaggcaccaatctgtttggatatcttattcttctctgcccttaacgcctctacctcttttttaatatccctgtttctctgatccaattccaaaacctgatccacaagctctaatttattgtcctgaaatttattctttatattttgttttaccacttccgggttttcacgcacaaatctaatatctaacatgacatgttcctcctgatagcctttatctagtttacataatatttacttatgatttacataattaaatttcaatatcttctaccaatccaaaattaacagctcttttcagcgcttccatctcttcctggctcagcataatgtaggattcccctttcacaatttccttgatatataaaaagcaattttctctgctgtgaattgcattcaggataaatcctgaattatcgttgtcaagcatagccaaaacaaaactcagctttccgcccatatcctcaaaggcatcatacttaacaattccatatttattgagggttttctccatacatttctttagtttcttaatttcaagattattaatatcatttgcttctattaaacgatctacttctgcaaatttgcgtacaaatgttttttccagtgactgggcatccttccccttcataaacaggttatacttccggctcagccggttaagacccagggataaattaaagacaacaatcagtaatattatcaccaataatatcattaatactaaaagaatacccgaattttcctggagtgtacttattatttcgctcatatgtgttatactccctcatcttatccgatagactccaataattcaatgatcctttccagttcatcctttgaatagtattctatctctattttccccttattatcatttttcctgttgatagcgaccttagtgccaataattgatttaattctctcctccaagtgctggtatataatatcctgcgtggtgtccttggtaacttccttcagcttttttgggtgtaacagctcttttaccagtttttcagtctctcttacacttaatttttcatcaaacactctggtagccgtgacatattgcagctccggctcctcaatcgcaaggagtgcccttgcatgacccgtactgagcatctcatcaattaccatttgtctcaccttttcatttaattttaacaggcgcatggaattggtaaccgcagtacggctctttgatactctgtcagctatctgatcctgttttaaatgaaattcttccattaatcgtttataggcaatcgcctcttcaataggatttagattctccctctgaatattttctatcagagagatctccactgtctcttgctcagaaaactgtttaacaatcacaggcacttccctgataccagctaacttagctgccctccaacgtctctcacctgcaataatttcataatagtcatctttttgctgaactaataacggctgtaaaatgccaaactgtttgatagaatccgcaagttccagaagcgcatcctcatcaaactgctttctgggctgctccctgttaggttcaacctttgtaattttaattttcattatatctcttggagataacttttcctctgaagcagctgctgacgactgttgctcttctgaagaacttacttttttaggctttacagctgctgctgtaggtatcaaagaatccaatcccttgccaagaccgcttttccttactgccattcttcgtcctccctatgtaatacttcttcagccagaagtctgtagctttcagcgccggcggacctggaatcatagagattaataggtaatccatgactgggagcctcagccaagcgcacatttctgggtataattgtcttatatatggattgctgtaaattatttttgacgttttcaacaacctgcagtgataaatttgtccttgcatcatacatggtaaataccacgccttctatttccaactcaggatttagacgctcctgcaccaattctattgtatgtatcagctgagtcaatccttctaatgcataatactcacattgtataggtactaaaatcgagtcagctgtagtcattgcattaatagtcaatatacttaatgatggaggacaatccataataataaaatcaaactgatctattaccctgtcaatttgattttttagtaaaaactctttgttttctattccaattaattcaatttctgccccagacagattcacattagatggaatcaaagagagattttctataacattctctattatacaatcagataactcacattcatccaacagtaactcataaagagtggcttctactcccattttatcaattcctaacccactggtagtattcccctgcggatcaatgtcaacagtcaaaactttctgacccatctcggccagacacgcagaaaggttaattgcagtagttgatttcccaacgccgcctttttgattagcaacggctatgattcttcccaattaataccccttctttccacttgtaatcttgcatatttatatgactgtttcattatatcacttttatactatgatttctataaaaatgtttcacgtgaaacttttttataggaattatataaataggaatagttttgttctttgttttggttatatttattgttattactgcacatatttatagtctttactaaatttatcattttaaacataatagatgaaagtatatctaggaatgtttcacgtgaaacattccctgttttcatatgagcttaaaacttgcttgaacatttctccttgtataatccccctcaatgttttataatataagtactaagactccgaaggaggtacccatctgatgaacaaacacaaacataaacttatcacaacggcaattttgtttacactggcaacaggtgtgattcatattatcaataagctattgtttgcatccgcaacaatgaaagaattgctgagaggaacatcaagaaagttttatgaatggagatttggacgcatttattataccaaacagggacagggctcgccgcttttattggttcatgatttgacagtttatagttctgattatgaatggaatattattgtggatgaacttacgaaaaactatactgtctataccattgatctcctgggttgcggacgttctgataaacaaaatattacctacaccaattttatttatgtacaaatgctgtctgactttgtaaaaaatattattggtgagaaaactgatattatagccagtggattttccggttcctttgctgtgatggcctgtcataatgaagaagagctgtttggcaagattatgctgattaatcctccttctttaaacgaattgaatcaggctccaacgaaaaaaacaaaaatattaaaatttttattggaactgcctatttttggtacactggtctacaatatgattactgcaagggaaaatattgaactgttatttacagaaaagtatttttataatccatttcttgcaaatagcagactggtggatatttattacgaaagcgcacacaagggggagcacaacgcaaaatatcttcactccagtataatcggcagatataccaataataatatcaatcatgcactggaggctattgatcatagtatttttattgtgtacggagccgaagaaaagaatgcaaaagaaatctgttctgcttacgtacagctaaaccctgctatcgaaactgcagtcctgtcaaaggcaaggcatcttcctcagttggaaactccaggcaaactgctggaacaaatatctatatttttttcataataaaatgtggagatccctcctgtaggagagatctccacattttaagtgatactagactgtgcattattagaactgcttacttttgtgtatctgttaacagattatccagcttttccaacatttctctgacgtccattttattcactaacaaataattattatgattatcaatagttaaataaaaattactgtcataagcataataggctacgtctgtctcttcaccactatctttgtcataaaactttatcgtcagttcgggttctgaagctacttccggcatactgtcaagtctgctgtttgattccataccggatactttttcataaaaagccagaaactctgcagagtctatttcctgatcattcatatagtatttcagctctgttttctgctcttcctcgtcctcagtattgtcttcttcagaggactctacttccactgatttactcaccactgtatagaccgtttgatcttttacaacctcaagtttcgataaatcggcaaaggatactttgttaacataagtatctaagtaaggagtaatatcatcatctaacagggtattcagttcctctgcacttatagtataaatcccctgtactccctcagtttttacatagtagttaccgctctcatctttttttcccacggatattaccaactgtctgtctacagttgtctcctgactatctccggatgtaccactatcttcagaggattcttcgctgctctcatcttgtactgtctctgtataatctgctgtaattaccgcagtgggatttgtaagtccgtattgttccagactatcttccttgtagttaacataactagtaaaagaaagactggaaagctttgtaaatgtattagaaactgcatcacttgcagctggttttgtggttccgtcccagccggttaccgtccaccctgtcttcgaattactgtcttcattaagcacaaattggccgtcctctttatctatcctatacttggttatactagagcttgtgatggcaggaaatgaagccttctcggcaagatcatacagtccgcagagaaaagacgttttcagctctgaatctataagatataccctgtcacttgcatcattaagatacatatagcagcctgataccactgtattatcatctccaatatagaaggaagtcttctcgccatccgtaccagtaacaataatacttgtctggggatcctccagcccatattcccccagattttccggctcttcaatcgtccgcaaggcctgcacatcacttaactttgacagtaagtcagataaggacggctgatctacaggaaaattcttatctgcttctaaataccatatattgtcttcttggataaaagtcagcatgttatcctttgcaccaaaagatacagaggccatatcggcttcttccagcgccgccacagaggaggtttttacctcctcctcagtgtcctccccatccttatttccggaatgcagcattagatacaaaaggacaagtagaactaatagtacaattcctgcaattaacgttatccctttttttcctctcatcactgttttctcctttttaaccagataccgcctcccagaagtaatacagcaacaggcagtacgccgatgcagaaaatactccaaaagctgctgtcagccgcggaaatagttaagttacttaattccatagatttcacagggacagaaactccttctgtatgctcacacatccatcccaaagagtcagtgattagctgaaaattgcttccggataccatctggtttgtctgatcactaaaaagactttccgatgaaaaatatacaatctgtgtttctttcccttcccctacagactctgtaattgatactcccagattaaaggggccgctgatatctccctcttccttttccagggtagaactttctacatttaccttagagtatgcgttatctgaagtagtaagaagattttcaatttttagactgtctctgtaattatccagggtctgaattccctgagcaaccggcattaatatataattgtttccggacgacaattctgaggttatgtctgtactttcaatgttaggaagaatataagtaggattattggaaatataatgattctgatctccttcaagtacaatcccatcacaggtttttactccgtaattctcaagaactgatgcaaaattaggcattttctccgacgaataactagatacaatgagagccttgcctcccccttccagataactgataatcttatctgcttcctcctctgaaatatcttttgcaggtgcaaggatacagattgcatctgcatcttccggcactgcatcttcggttaacagattaagatcagcaatagtaatattctgctttgcaatggcatccttcaggtttgtacttatggctgcctcctcatgcccctgaagtacatacatagtaggaagatcttcagatgtcacatagtctatggcacttgtgatctggccttccccgtcaaacccggtcacctgtgaagaataggtagtataatcaatatcactctcatacatggtattgtagctgacaaccttatttctatctccgcatacaactataatgctgttatcgctcacctcatcctgagtatattgtgacgtgaagttagggtatagcgccggatccttcttttccaccttgatgtgactgctttcatccttatatctctccagcagtctctcgatatcactgctctctctaccatcctgtacaatataatataaggttacgtcctcctttaactctctgagaacttttttcgtctgatctccaatggtatacaatttttgctcacttaaatctaactctctgtattgtgccggaatctcctgtaccaccagattcaaaacaacaataacagcgataatcactgctgtaattccaatgctgtaagatccatttttaatgtttttcctatttttctttctgttattaaaatactctttacaattgattttcttcattccttcaccccctagctccagcgtctcttctgtattgactgaacagtgaggaacacaaaaatcagtatgatggataacatataaacaatgccggataaatcaagtatacctccaacaaagccatcaaaatgtcctgttatattaaatatttccataaacttctgaatcgctccttcaaaaagggatgatttccacagaaacagcccaaaggtggcacctgccattattataccggcgatagaagttaccaaagtgtcttttgtcattctataaataatcagacagataattaccgccgcaataagaatagataccagagaggcggacgctgtctgggctataaaagactctatcccctgtatcacattacagacaaataatactgcaaatgtcaggactgctgctataatttgactctctgttatggaggagaggaataatccaactgcaatattcccgcatcccattaaaaaaaatccaaaaattgccgtatatgccataggataagatattgttccatatttccccataatcagaggataagtacatataatagccataggtatgaataaaatggttaccattcccaggtatttgccgcatacaattttccatacagacactggggcagtaaacaatagctgatctgttttttgttttttctcttcagcaagtatacgcatggtaagtacaggcgtaataatcagaaatacaaagcttactgcacttaaagtcactccaaattcagggtaagccgaagtcagattataagctgtaaaatatactcctactatagccagaacaaatgctataaatacatacccaatcatagaggtcaggtatccccttaattcctttttataaactgctaacattttcttcctccttgtcgtctgtcaattttaagaatacatcctccagtgacatatttgtggactgcatctttagaatcggacactttccgtcggcaagggcaaagaaaatattttcccgtatatcctcctgtccgttggtctttatggttatttcatgtgcattttctataggcgaattgtgaaagactgcatcctcgatgtgctctacgagatccaacgccttccttatatcttcttcctgcccttttacagtaagctccagagaattggatcccagcatcagtttacttagattatccggcgtatcgctggccactaattttccatgatctataataagtacataatcgcacacggcgcttacttctgataaaatatgtgaacttaatataaccgtatgtctcttactcaaacctttaatcaaatcacgaatctctataatctgtttaggatccagtccaaccgtaggctcatccagtataattatctccggatacccaagaagagcctgggccagtcctacacgctgcttataaccttttgaaagatttcttatcagcctgtgattcatatcctccatctttgtctgtgagattacattgcaaatttccttctcccgctccccttttggtatttttttcagttcagccgcaaaggacaggtattcccacaccgtcatctcaggatatatggggggaatctccggcagatatcctatacacttttttgccttttcaggttccttaaaaatattatagccattaatatagacttcaccctctgtggatgcaatatagccggttatcatattcatggttgtggactttccggccccatttggaccaaggaagccgtagatcttgccctgttcaaccgtaaagttaaggtgatctaccgctgtctgctggccatatttttttaccaggtttcttacttctatcaaaattttccctcctttaatttgttagccatttataattttatttacattgtgtgatggaaattaggaaaaattgtgataattatgtgaaaagtttgtgtgcagagaaatgtatgtttgaagcagaggagacggaaaagaactgggtcccctgggatattgaaggccataggagggggtgagggcaggtatagatgaccattcgaggctgcgcttgcctcagctaactgcctggccgctcactaagaagctcaggatagccttcgcttctaaatgatcgccggcagtggatcttcggctcgctccgcttaacctcatggtcatctatacctgccctcaccccctcctatggccttcaatatcccaggggacccagttcttttcctggctgatacaaaattcacgtatagaaatagcggtaaagtattaaattttacagttcttgtacattcatggtattcatagaatcacatgataggctccctggttgggaggccggcttttcggggatatttcttgggggttggcgtttgttttataatttttatgagagagcgggtgatgccgctgttcattagaggaaaggtcgccgggggagcctgacagccgcccagggtttttatggctttttgggcctgtgtcagttcttcctcaatggttcctgacttgtaggaaatgaagcatcccccaggtttaacataaggcatacagtattcggtgagggatgcaagatttgctacagcccgggatacgcttacatcataggagtctctgtgctccggttttctggctatatcctctgcacggccatgtactgccgttatcccctccaagcctaactgtccgatgacctcattcagaaaattaatccttttatttaaggaatccaggagggttaccttaatgtgagggaatgctatctttatggggagccccggaaatccggcaccagtacccacatcaatgagagaacttacctgagacagatcgatcactcttgtaacagccagactatctgcaaaatgctttaacaatacatcttcccactgggtgatgccagttagattcattaccttattccactcaactaacagttcataatatcggataaactgctgcctctgcctctcagacaattccagacggaactctttgcagcactgttctaatattgataaattataatccattttattctcctgatctttactgttttacacaaaatttatatccatagacaagagttatccacataattatttttttatacacacagatgtggacatctcacccagatttttcttgccaggtggatcatctctggttatatttatactgttccaaatacactaggaggacagatatatctgccggtgagactcctgatattctggatgcctggcctatagagacaggacggtacaattttaatttctgttttgcttctattcgaagtcctcccacagcatcataatctatttcttccggtattttttttgattccagctttttaaactgctctacctgttttaactgcctgcggatgtatccgtcatatttaatattaatattcacctgctctgctacatcccagggaagccggggcctttcaggatcaacaggagccaaaagctcataagaaagttcaggccttcgtattaattctgccaaggttgtccctgttttaagaggggtgcttccataggattccaataattcctgcacttgtctggatgcacctatatttctgtgctctacacgcttgatttccgcctctatctgctcttcctttaacaccagcctgtcatactctgcctgttctataagacccgcctcaaatcctcttttacggagcctcagatccgcattatcctgcctgagaagaagtctgtattctgccctgcttgtcatcatacgatagggctcatgattctcctttgtgaccagatcatcaatcagcacaccgatgtaggactctgatctgtccagaaccatcatctctctgccttttatctttaacgcagcatttattcctgccaccaatccctgtgccgcagcttcctcatacccggaactgccgttaaactgtcccccgctgaacagacctcttatgttcttgaactccagagtaggattcagctgccttggattaatacaatcatattcaatcgcataggcattcctaactattttcgcattttccagcccttttacagaccggtacattgcctgctggacatcctccggcagggaactggacattcctcccacatacatttcagtagtgtacagcccctcaggttctataaatacctgatgcctgtttttatcagcaaactttaccaccttatcttctatagacgggcagtatctggggccggtaccctctatcatcccggagaacaaaggggatcgatccaggttttcctttataatttcatgggttttctcgttggtatatgtcagccagcaggaaacctgctctatctggacatcctccggattcgtggaaaaggaaaacggcacaaccttttcatcccccaactgttcttccatttgagaatagtctatacttctgccatcaattctggcaggagtccctgttttaaaccggaacatttccacaccaagctttttcagagaatccgtaagataattagcagcctgcagtccattaggtcctgtataggtgctcacatccccatagatacatctggcctttagatatgtgcctgtacagagaatcactgcttttgccatataggacgccccagaaaacgtcttgactcctctgatggctccgtcttcggcgagcagctctgtaacttccgcctgcctgacagtcagatgctccgtatgttccagaacctctcgcatagtcttgctgtaattctgcttgtctgcctgagcccggagagaatgcactgcggggccttttgatacattcagcatcttagactgaataaacgtcttgtctataatcttccccatctctcctcccagggcatcaatttctcttaccagatgtcctttagagctccccccaatattgggattgcagggcataagggcaatgctgtccacgctcacagtaaacataatggtctccatcccaagcctggcactggccaaagcagcctcacatcctgcatgccccgctcccactaccaccacatcataattttctattaaagtattcattccttatcgctcctgtttctactttcctgtacagaatttgctgaaaatttcatttaccagatcttcgcccacagactctcctatgattcttcccagggcttcatacgcattcattaaatcaatagaataaaaatcctcaggcatgcccgttgatatactctgttctaccatagtcagactttccatagtctcaaaaagagcagttttgtgacgtacattggtaatatacacttcatcgttaaaggaaatctttccctgaaagaacatgtccctgatgacctgttccagctcaccgatccccttctcttccttagcggatattgcaaccacaggatgattcagcctcttctttaactcctccttggatacctttatagacaaatctgtcttattcagaagaacaattgcttttttatcctgaagcattcctataatctcatcgtcattttcgtctaatggtatcgaagaatccactacataaagaatcagatccgcatcttttgcgtactctttcgccctgcctaccccgatctgctcaaccacatcctttgtatccctaatccccgcggtatcaatcatacaaagggaaatgccgtggagtataattgtctcttccagaatatctctggtagtccccgcaatatctgtaacgatcgctctctcttcccccacaagaagattcagcagagaggatttgccggcattaggctttccgacaataactgttttaatcccttccttcatcatttttccttcatctgaggactgcagaagtttttccacttgtttctttaagggctgcagctctgtcatcaattcttccccatatccgtctattacaatatgctccggatcatccagagcagattcaatataagcaatgtgatagataatcttttctctgatttgtcttataaccttaagaacagctcccttgagctgacttactgagctcttcagagcatattcactcttggccgagatcacatctataactgcctccgcctgggaaagatcaattcttccgttcaagaaggctctttttgtaaactctccgggttctgcaggtctggctccatacttgatcactgtctccaatacccgtttcatagccagaactcccccatgacagtctatttccacagtattctcagccgtatagctggacggtccgtccattaccataaccagaacctcatcaatggtttcctctccgtcacagacaaatccataatgtatcgtatgtgatcttaccttcctgatatcttttttcccgctcctggagcggtatattctgctgacaatttctcttgcatcctcaccgctgatcctaacaatacctattcccgatgtgctcatagcggtagcaattgcagcaatggtatcggccatattaattcctcctgtactccaatataaaaaaagttaccccgggagaaagcacacgtctgcacgcgttattcatgctttcacctagaataacttttatataatttattattttttaagcttaactacaacatgacggtaaggttcatttccctcactataggtctccacataacggtttccctgaagcgcggaatgaatgatacgtctttcataaggattcataggttccagcgaaacagcctttcttgtctttctcaccttataagcaatgctctttgcaagattttcaagtgtctcttttctgcggcttctataattctctgtatccagttttacacgaatgtaaccctgtttgcccttattgactacaagactggtgagatattgcagggaatccagcgtctgtcctctttttccgataagaatacccatatcatcgccggaaaaatcaatatccagattcccctcttcctgatgatattccatcttaatgacaacttccagattcatggcatgaaatacaccatccaggaactttttagcctcatctttaatgtcttctacttcttcctgagatctttgcactgctttgggttcctctgccgccttaacctcagccttttccactttaggctcagacttcttctccggttttggttccgctttggcttctttttttacttcttttacaggcttctctgtaggtttttcttttttcacttccggctttttctctgccgcttcctccataaaaggatcctgctccggtttccttctcactcgaatcctagccggcttactgccaaatcctaaaaaacctgagcttccatgttccaatacttctatctcaagattttcacttgaagtttctaattcaagacatgcattggtaatcgcctgatctaccgtttttgctgagaattccttgaaatccatgacaaatcccccttacttgtttactgttttttgttcttcgacttattcttttcatcaaactgagctaccatatttgcttttgccgcgatactgccgggcttggcattcgcagctctcttataataatccgtggaattcttcacagcctgctcccggtcctccggagtttttccttttgtcttaggctcgtcaatattccttacattcattctggcctgctgagagattttctgaggaggcagtcctgctttctctctcttcttattcatcttctccagattcttcttaacaagctcgtccatgtcttccttctccagcagcttattgattacaaactgctgtacactacggattaccgcaccggcgatccagtagataccgataccaacagggaatgtaaaacacataacagcagaaaacagaggcataaaagtattcatactcttcatggtagcttccatctgtgtagactgcttattcttatcatcgcccttgttgctattgttaaatgccatagaaagcttaatattcagaacctgtgtcagccatgccaaaacagggattaaaatagctccaacaagtaatatatattgatgtgaaacaaaacttgactttataacagacaatggattatctgcgatattcagacccaggaaattctgcatgggagacagcttatcagcggtactggcaatggtatctgaaaaaccggaaaattttccaatctctgacagtttgtcccactgggttggggaaagattatataataaatctataatcgaatccttggttgcttttccattatccaggatcagacgtacagtcttaatcttctcgtcatccagaaatgtctgaagtatatccgtatacccgccaacacccataatctgagtgattactccgtcaaaagtagctttaattcctgtaacataacccggaatcttatagataacctgatataatgcaaacagtatgggcatctgaatcactaactgcagacagcttccggtaggggatacgccgtatttctggtaaaccatactggtctcttcctgcatcttctgcatggacacctgatcttttttattctgatatttcttctgaatcttctgtaactctggcgccataactgcattcagcctggaaaacttctgctgtttgatctgcaggggcgtcattaaggtataaattactaatgtgaataagataatacaaagaccgatatttgtaacacccaggctataaatagcattcatcaaaagtcccaggatatctgcaaaccatttgataatgggcattgtactctttgtcaataaaatactcaaaacaatttcctccttaaccgactactcgccgttatcgcttcttaggataactcatccttacctttacggcaccgggtcataacccccatgagaaaaggggttgcacctgaggatccgccaacaagctaacatagatcccttaacagcaccatatttttgaattgcttctaatccatactgagaacaggtaggtatataaggacaacgagttctctttaatggggataaatatttttgatataacctaatcattttgattaatatcgttttcattttcctgcctttttgtaatacggtgaagctttgccaaatgcaaaagtgcactttcaatatccctgaatttcctgtccttggcatttactctcacaataatcaccatatcatatccactacgaaatacttgttcatgcaatcgataactttcccgaatcaacctggtcagatgatgcctcacaacactgtttccgacttttttacttaccgaaattccaactcgatttctttccagctggttttccattacatacataacaagatatcgatttgcaaaagatgttcccttcctgtaaaccacctgaaaatctctattcttttttaacgactccgaatattccatagtacattcctttaattaagaagtttctgatctttaagagaagaaaagaccacatatctgcggtcttatgctgataattgctttcttccttttaatcttcttgcagctaaaacttttcttccacctttgctgctcattctcgctctgaaaccatgaaccttagctctggatctctttttcggttgaaatgtcattttcataagtctggcacctcctttatcttaccaaatatctatcatatatggctgattattctattatgcatgattgaaaacatcatttcaattatatgcacaaaacactaattcgtcaagaggaaatattatatttgtaataagtttggaaaaattatttaaaccagctgtctccttacgacaccccaaaataacaaattccacaataaaaagttatcccctgacattttttatagtttacgtaactttatccacaaattgtggataacatgtggataactttgtggtttcatgtgtaaagatcccccaatattctcaaaaacccttattttctccataattcgacgtgtgtgttatgggtataagttatacacacttttcacatcatatcaaagatcttcattcttatggaaactttatcaacattctatacacattttttcattgcgaaaattcacgatttattataatatataagaaatgatgaattaaaatagatggattccaggaaatgattgaatgaagattttcagacaatcatttattgttgtgtttatccatggataaattaagtagcttagagtaggagatatggtaatgaatataatagaagaaaaatggacggagatacttaatacagtgaaagaggaacacgaactcaccgatgtttcttttaaaacctggctgttgccattgactgtgcatactgtggagaatgataccgtaaccatcctggttccatcagaacagtttattacttatattagtaaaaaatttactcttcctttaaaagttgccattagtgaaatcactgggcatgattatgagatcgcatttattttgccggaagatgtaaaacaggataagacagctgcacccgcagcttcttctaatttagggaatactgcggaaaaggcaaacctgaatcccaagtatacctttgatacctttgtggtgggaagtaacaataaatttgcccatgcagcttccctcgcggtggcggagtcccccggtgagatttataaccccctgtttctgtacggaggtgttggtttggggaaaacacacttgatgcattccatagcccattttattttagagagggatccccggtcaaaggtattatatgtgactagtgaggtctttaccaatgaactgattgaggctatccggaacggcaataatactactatgacaaaatttcgtgagaaatacagaaatattgatgtacttctcattgatgacgttcagtttattataggtaaggaatctacacaggaggaattcttccacacctttaatgctctgcacggagcaaagaagcagattattatatcttcagataagccgccgaaagatatggaaattctggaggatcgccttcgttcccgttttgaatgggggctgattgcagatatttcctcccctgactatgaaaccaggatggcaattctccgaaagaaggaagaattggacgggtatgacatagacaaagaggttattgaatatatcgcaaggaacataaagtctaatattcgtgaactggaaggcgctctgaataaaattatggcatacgcgaatcttgagaagagagaagtaaacattgagctggcggagaaagtattaaaggatattatttctcccaatgaaaaaagagtaattaccccagagctgatcatagatattgtagctgaacattttgatatttcagcctcagatttaagcggtactaaaaggaattccaaagttgttcttccccggcagattgccatgtacctctgccgggaaatgacaaatgtaacacttaaaaatatagggaaatgtctcggcaacagagatcacaccacaattatgaatggctgcagcaaaattgagtcggaattaagtaagaataatgaaaccatcagcagcacccttgatatccttaaaaagaagattaatccaggtaagtagggtggtagagatcaattatccacaaatgccggttgatctcatgttaataagaggtggaaatgtgtgtacaagttgatctctctttttgtaatgtgaattatcaacaattcatacaccgggaatccggatatttcccacatccttatccttaagctaaaccctctggttatctggggttaaagtagtttttcacatattcacaccctctactacggatactacggattatttattatatttatttgtttaagccactttttcacatgaagggagttatacacattatgaaaatatcttgttccaaagggaatctactaaaaagtgttaatatagttatgaaggcagtaccctcgaaaactacaatgcctatactggaatgtattctgattgatgcttctgctggggatatcaaatttacatccaatgatatggagcttgggatcgagacaaaggtagaaggcacgattattgaaaagggtatcattgctctggatgcaaagatcttttcggagatagtgcgaagacttcctgaaaatgaagttgtcattaccaccgatgaaaaactgaatactttaatcacttgcgagaaggcaaagtttaatatccctggaaaatcgggagaggatttttcctatcttccatttatagaaagggatgagtgtataacactttcccagtttactttaaaagaaatcattcggcagaccatcttctccattgctgccaatgaaaataataagctgatgacgggagaattgatccagattcaggaggatacgcttcgtattgtttctctggacggacacagaatctcaatccgtaaggttcagctaaaggaagcagcgaaggatcggaaagtagtggtacccggaaaaacactcaacgagatcagtaagatcttatccggggaagcggaggatatggttcatattttttttacagacagccatatagtatttgaatttgatgaaactgtggtggtgtccaggctgatcgagggtgagtatttcaagattgatcagatgctgtccagtgactatgagactaaagttaagattaataagagagaatttttaaactgtattgacagagctacgctgttggtaaaagaaagtgataaaaaaccgattattatccagatttcagacggatctatggagcttcagatcgattctcaaattggatccatggatgaagagatcgacattgagaaagaagggaaagatatcctgattggatttaatcccaagttccttatagatgctctgaaggtcatagacgatgaagaggtaagtatctatctgatgaatccaaaagcgccctgctttatcaaagatgaagaagaacaatatatttatttaattttgccggttaattttaatgcggtgaacagataggaaaaaatatggataacataaaattaagagaagaatacatcaaattaggtcaggcgataaaagccgcgggctttgtagaggacggagtagaggcaaaatatgtcatacaggacggacttgtaaaagttaacggggagatagatacaagaaggggaagaaagctctatgacggggatattgtatcctttcagggcaaagaaatcaaagtcataaagtaaatcaggtggcccatgtatattgaatctattgaactgaaaaattatagaaattatgattctctttatatgaagtttgacaaagggactaatatactgtacggagataatgcccagggtaagacaaatgtactggaggctatatatctctgcggaaccacaaagtcccaccgcggaagtaaggacagagaaatgatccggttcctgcaggacgaatcacatattcggatgcttgtaaacagagatggcgtatcccacaaaatagatatgcatttaaaaaaaagcaaatcaaaggggattgcaattgatggacttccaataagaaaagctagggagctttttggaattgtaaatattgtatttttttctcctgaggatttgaatattataaagaatggaccgggagaaaggcgccgttttttggatctggaactttgtcagctggataaattatatctggcggatctctcttcttacaatcatgtagtcaatcagagaaataaactgctgaaggatctttgggtccgcccggaactgaaggataccatagaggtgtgggatgagcagatggtccactacggcagcaagatcataaaggccagagaaaagtttgtcagggaattaaatgatattatcggtgagattcacagaaatctcacggggcacagagaagagattcgtcttctctatgagcccaataccccggcggaacagtttaaaatacacctggaacataacagagagaaagactataaatttaaaacaacttctattggcccccacagagatgatttatgtgttaatattaatgatattgacattcgcaaatacggctctcaagggcagcaacgaaccgctgcattgtctttaaaattatcggaaatttatcttgtaaaaaaaatcattaaagatactccaattttattattagatgatgttctgtctgaattggacagtaaccggcaaaactatttattgaacagtatccgggacatacaaaccctgatcacctgtaccgggctggacgagttcgtaaataatagatttaaaataaataaagtgttcaaagtggtagagggaagtgtctaccattcaaactaggcaaagagcttataacaggaggaatcgcatgagtacagagtacggagcagatcaaattcaaatattagaggggttagaagcagttcgtaaaaggccgggtatgtatattggcagtacatccgcaagggggctccatcatttggtttatgaaattgtggataacgctgtagacgaagctttggcaggcttttgtgataccattcacgtgtctgttaacaaggacaattctattactgtcactgataatggacgtgggatacctgttggaattaatcataaagcggggattcctgcagtagaagtagtatttacaattctccatgccgggggcaaatttggcggcgggggatacaaggtatctggcggtctccatggggttggcgcttctgttgttaatgcactttccgagtggctggaggttactatttacagcgagggaaaagtataccggcagcgctatgaacggggacatgtagtatacaaattaaaagttatcggagaatgtgatccggataaaagcggtaccatggtatctttccttccggacaaagaaatttttgaagagacggtctttgattatgatgtgctgaaacagagatttcgtgagatggcattccttacaagaaatcttaggattaccatccgtgatgaacgtcctgaggatcctgtagagaaatccttccattacgagggaggaattaaagagtttgtcacttatctcaacaaaagtaagacagatctttatccggatattatttactgtgagggagaaaaggatggtgtagccgttgaggtggctatgcagcacaatgattcctatacagagaacacttatggatttgttaacaatattactactccggagggtggaacccatattgttggattccggaatgctctgaccaagacttttaatgaatatgccaggaaaaataagcttttaagagatacagagagtaatcttaccggtgatgatatcagagaaggtttgacggctattatcagtgtaaagatagaggatccccagtttgagggacagacgaagcagaaacttggaaacagtgaagccagaggagctgtggataatattgtaagcaatcagttggagattttcttagagcagaacccttccacagccaaaattataattgaaaagtctgtgctggcccagcgtgcacgggatgctgcaagaaaggccagagaactgaccaggcgtaagactgctctggaaggcatgtctcttcctggaaaactggcggattgttctgacaaagatccgaaaaattgtgagatctacatcgtggagggtgattccgccggcggttccgctaaaactgccagaagcagggcgacccaggcgatccttccgctgagaggtaagattctgaatgtagaaaaagcaaggctggacaaaatatatgccaatgctgagatcaaagctatgatcactgcctttggtacagggattcatgaggattttgatattacaaagctcagataccataaaatcattattatgacggatgccgatgtagacggtgctcacattgcaaccttattattaacctttttatatcgttttatgcctgaacttatcaaacagggatatgtatatctggctcagcctcctctttataagcttgaaaaaaataaaaaggtgtggtatgcctacagtgatgaggagctgaacaatattcttgcagagattggacgggataccaacaacaagattcagcgctataaagggcttggggagatggacgcagagcagctctgggaaacaactatggacccggaaagaagaatcctgctgagggtgaccatggacgaggaggcctcttcagaaatcgatttgacctttaccacactgatgggggataaggtagagccaagaagagaatttatagaggcaaacgccaaatatgtaaagaatctggatatttaataaatatcacccctttgactcttaattttcaacaggcaaaacaggggatgacagcccccgtaaaaggagaaaacaatggaagacaatatttttgataaagtccatgaggtggatttgcagaaaacaatggaaacctcttatattgactatgctatgagcgttatcgccgcccgtgctcttccggatgtgagagatggactgaagccagtgcagaggcgtgtgctctattcaatgatagagctgaataacggaccggataaaccccataggaaatgcgcccgtattgtaggtgataccatgggtaagtatcacccccatggggacagctctatctacggagcactggtgaatatggcccaggaatggtctacccgctatccgctggtagacggacacgggaattttggttctgtggacggcgacggcgcagcagctatgcgttatacagaagccagattaagcaagatctcaatggagatgctggcagatattaataaaaacacagtggattttgcgccgaacttcgatgagacggagagagaacctgtagttcttccctctagatatccgaaccttctggtaaatggtacttctggtatagccgtaggtatggctaccaatatccccccccataatcttcgggaggtgataaatgctgttgtcagaattattgataacattatagaggaagacagagacacagagatagaggagattttagaggtagtaaaaggaccggattttcctacgggcgcaaccatattgggaacccggggaatcgaggaggcttaccgcacaggaagaggaaagatccgtgtacgggcagtgacaaatattgagactcttcccaacggcaaaagtcagattatagtcacagaactgccctatatggtaaataaggcaaggcttatagagaagatagcggaactggtaagagataagaagattgacggcatcgtagatctgaacgaccattccaaccgtgaaggtatgagaatctgcattgacctgagaagggatgccaatgccaatgtggtattaaatcagctctataaacatacacagcttcaggatactttcggggttattatgctggcgcttgtaaacaatgagcctaaggtacttaatcttctggatatgctaaggttctatctgaaacatcaggaagaggttgttaccaggagaacgcagtatgatctgaataaagcggaagagcgtgcccatatattagagggacttttgaaggcactagatcacattgatgaggtgatccgtattatccggagttccagaaacacacaaatagccaaagagggattgatagaagcctttgaactttccgaggttcaggcacaggcgatcgtagatatgcgtctgcgggcacttacaggtctggaaagagaaaaactggaaaatgaatatcaggaattgatggaaaagattcgtcagtataaagcaatcctggcggatcgtaatcttctccttagaattataagggaagaaattctggcgatctcagagaaatttggggatgagagaagaacatccatcggatttgacgagtatgatatttctatggaagacttaattccaaaggataatacagtcattgccatgacaaaactcggatatatcaaaagaatgacagtagacaatttccgcaaccagaacagaggcggcaaaggcattaaagggatgcagacaattgaagacgactatattgaagaactactgatgacaaccactcatcactatctcatgttctttaccaataccggcaaggtttacagaatcaaagcgtatgagattccggaggccagccgcacggcaaggggaactgccattattaatctgcttcagttatctccgggggagaagataacagcagtgatcccgattcataaatatgagaaggggcactatcttatgatggcgaccaagaaaggacttattaaaaagacacctattacagattacgaacatgttcgtaagaccggtcttgccgctattactctgagggatgaggacgagttgatagaagtcaagtctacagacaaccgcaaggatattattctggtgacaaagttcggtcagtgtattcgtttcagggagacggatgtaagaagtacaggaagaacatctataggggtcagaggaatgaatcttgctgacaatgatgaagtgataggcatgcagctgaattctcagggagattatcttctgattgtatcggagtacggtatgggtaagatgacttccatgggtgagttcaccagtcagaaccgaggcggcaaaggggtaaaatgctataagatcatggaaaagacaggaaatgtgatcggggcaaaggcagtgaatatggataatgaggtaatgttgattaccactgagggaatcattatccgtctgtcctgcaaagatatctctgtgctgggaagaataacttcaggggtcaagcttatggatttgaaggatggagtgtccgtggccagtattgccaaggtaagggaaaagtcagaggaatcagagcctaaaaatgaggagtcaggagctgaagaggaaccagaggcaaaagaagataaggaataatcagataaagggatagaacctagggagcacggaagaatgaagaaattaaaaggggtaggagtcatacttctcgcagctgctgtcttactcagcggctgcggggtgaaagtaagcaataattcaccggagagcgtcgtaaaatctctggtcaatgcgtatcagtttgaagatgaggacgcagttaaaaagtgtttcggcattggaaaaaaagataaggtagatgcagatgttaaaaaagaaatagattacaatttaaagtattttaaggcacacggggcaaaggatattaattttgaaaagtgtgagtcactggggaccttcaatggttatgattttgtttatgtaatctatgactatgagatgaaaaagacaacgacaacaaagaataaaaaaggcaaaaacgagaaaaaaacggtgaagcttcaggctccggctatcagtacatactttgtaaagaaaaaggataaagaatattatgtggttccgggtaaggatattactacagagatgagtgatatttccaaagaacagtatgcaaagtttgtaaagacagaggactatgaaggttatgaaaagcgctataacaaatttataaaagataatccggattatgagaatgatatttcagaggaactggataaattgttaaatggcggcagtaaagaaaaaaaatgatgaggggaagggactttgaatcaatcttttgatttataagttcctttctaaggtttatagatagtaaaagtagacgtcaggaggaacgtaagcatgagagaactcggcgtagggcagcttactgcaaacattaaggaaatgtgtatcgaggcaaatcataatttatcacccgacatggtgcggcgtatggaagaggcagtcggcaaagaagagtctgccctgggaaagcagatcctggaacaattgcaggagaatcttgagattgcagataaagacaggatccctatctgccaggacaccggtatggctgttatatttctggaagtggggcaggaggttcattttactgggggaagtgttgaggatgcggtacacgaaggcgtgcggcaggggtatcgggaaggttatctgagaaaatcagtggtcagggatcccatttacagagagaatactaaagacaatacacctgcagtcattcactattctattgtcccgggggaacaggtgaaaatcacggttgcccctaagggatttggcagtgaaaatatgagcaggacttttatgcttaaacctgcggacggtatagagggggtaaaaagtgctatccttacagctgtgcgggatgcagggcctaacgcatgtccgcctatggttgtaggtgttggaataggtggtacttttgaaaaatgtgccctaatggcaaaagaggcactgaccagagatactgacagaagatctcaaatcccttatgtcagggaattagaagaggagatgctggaaaagattaatggatccgggatcggcccaggtggattgggaggcagaattactgcattggcagtcaatattaatacctatcccacacacattgcaggtctgccggtggcggtgaatatttgctgccatgtaaaccgccatgctgtcaggataatataagaggaatcatagttgcagtacttaattcagggaggatatcagatgaataagcatataacagcgccgcttgaccatgaaaccgccggtgatctgagagcgggagattatgtatatattaccggaaccatttttacagccagggatgctgcccataaaagaatggacgaggcactggacagaggagaggaactgcccttggatgtgaaaaataatattatctattatatgggaccttcccctgccagagagggacggcccattggttccgcagggcccacaacagccagccgtatggataaatatgccccccgcttattagatatgggattaaagggaatgataggtaaaggaaaaaggactcctcaggtgttagacgctgtggtgcgcaatggtgcggtatattttgctgctgtggggggagcgggagccttactctcaaaatgtattatatcctctgaaattattgcctacgaggatctgggtacggaggcggtaagaaagcttaaggtaaaggatttccctgtcattgtagtagccgattgtaaggggaataatctctatgaaaccgcgatcaaagaatattgtacagaaaattaagacaaaagggatggaatcatgaaaagaattatattgatggtcttatataatattatacttgtgccctatctctattttaaattgtgttactatgcttcccatgcggacaaatatccagaggctgagagatatgaggttctcaaactaatagaccgccgcgccatgaaagggggaagaattaccatagatgcccatggggtggaaaatctgccagccaaggatggatttatgtttttccctaatcatcaggggctatttgatgtgctggctattctccaggcctgtccccgccccttttctgttgttatgaaaaaggaaattcaaaatacaccctttctgaaacaagtgtttcagtgcatgaaggcatatgctctggacagagatgatgtgaggcagtctatgaaagtgattcaacaggtggctgtggaagtgaaaaacggaagaaattatctgatttttgcagagggcaccagaagccgaaataaaaatgagctattagagatgaagggcggaagctttaaaagtgctacaaagtctcaatgccccattgtccctgtagcccttattaactcctaccaggcgtttgatacaaattcaataaaaagacttacggtacaggttcattttttgaggcccctttattatgaagaatataaggatatgaaatctacagagattgccgcggaagtaaaacgtcgtattgagactgtaataagggaaaatgagtaaaatttataggcacattagtacagatttatggtgaaataatgtaagaaatgacttaaaactgggcataatgaagttggggattaattccaaatacagctgcaaaagagttatggaaaatattatgaaaaatcttgttgaaaattattgacaaaagagtttttagcaagtataataacatgtgcgtcaccgaattgggagcgcatataattattttagttaggcatttggagaagtactcaagtggctgaagaggtgcccctgctaagggtataggtcgtttacgcggcgcgagggttcaaatccctccttctccggtttttactaaaatagtgataaaaaaagccttgacagtaaatggtaagatatggtaatatatcaaagttgctgttaggcaataagaaaagagaaaaaagttgttgacaaggcagactgcttatgatattatataaaagttgctgtgagtcatacggaaataactgataaaaagaaataaaaaaagttattgacagacacaacagcctgtggtaatatttaagagttgctgctgagataagaaatcagccgacaacagcaagcactttgataactaaacagtgaaacacattaacctgaaaattctaaaaaagtaacatttttgggatgagtaaaaatccttaaaaacagtaaaagggataaattagccaaagttaattttgaacttggacaactcgagaacgaaagttcaacactttatcagagagtttgatcctggctcaggatgaacgctggcggcgtgcttaacacatgcaagtcgaacgaagcataaggaacggattatttcggtaagaagtactttatgactgagtggcggacgggtgagtaacgcgtggataacctgcctcatacagggggataacagttagaaatgactgctaataccgcataagcgcacagtgctgcatggcacagtgcgaaaagctccggcggtatgagatggatccgcgtttgattagctagttggtggggtaaaggcctaccaaggcgacgatcaatagccgacctgagagggtgaccggccacattgggactgagacacggcccaaactcctacgggaggcagcagtggggaatattgcacaatgggggaaaccctgatgcagcgacgccgcgtgaaggaagaagtatttcggtatgtaaacttctatcagcagggaagaaaatgacggtacctgactaagaagccccggctaattacgtgccagcagccgcggtaatacgtaaggggcaagcgttatccggatttactgggtgtaaagggagcgtagacggcagtgcaagtctgatgtgaaagcccggggctcaaccccgggactgcattggaaactgtgcagctagagtgtcggagaggtaagtggaattcctagtgtagcggtgaaatgcgtagatattaggaggaacaccagtggcgaaggcggcttactggacgataactgacgttgaggctcgaaagcgtggggagcaaacaggattagataccctggtagtccacgccgtaaacgatgaatactaggtgtcgggcgccaaaggcgttcggtgccgcagcaaacgcaataagtattccacctggggagtacgttcgcaagaatgaaactcaaaggaattgacggggacccgcacaagcggtggagcatgtggtttaattcgaagcaacgcgaagaaccttaccaagtcttgacatctgcctgaccggtccgtaacaggacccttccttcgggacaggcaagacaggtggtgcatggttgtcgtcagctcgtgtcgtgagatgttgggttaagtcccgcaacgagcgcaacccttatccttagtagccagcaggtagagctgggcactctagggagactgccagggacaacctggaggaaggtggggatgacgtcaaatcatcatgccccttatgatttgggctacacacgtgctacaatggcgtaaacaaagggaggcgaaggggtgacctggagcaaatcccaaaaataacgtctcagttcggattgtagtctgcaactcgactacatgaagctggaatcgctagtaatcgcgaatcagaatgtcgcggtgaatacgttcccgggtcttgtacacaccgcccgtcacaccatgggagtcggatatgcccgaagccggtgaccgaacccgaaagggaaggagccgtcgaaggtggagccgataactggggtgaagtcgtaacaaggtagccgtatcggaaggtgcggctggatcacctcctttctaaggaaaagaagaagtaaggaaaatgtgttttactgttgagttatcaaagactcagatccttctggtggcgatacgtttaggggaaacacccgtacccatcccgaacacgatggttaagacctaagcggccgatggtactgcactggagacggtgtgggagagcaggtggctgccagattaaaaaaaagaaaaaccgaaaggttatcataaatagaaaaggcaagaaactaaatgcatgtaccggcacggaggaccgtgctaacctacatcagcaggggaatgctgtttctataactggttttaccagtgatttaagcgaaaaagagagatttttcgtttaaatggctgataaaatatcagctaaagtctgtaccttgaaaactgcatatacgaaaaaatatctaaaaaacgttaaacgtaaaagatagagacatccgaggtcttatgggaaaccataaggaatcaaagaaagaaaaccaagcaacacagaccgtctgcttctaacgctatagaaacaggaaggtcaagcgacaaagagcgcagggtggatgccttggcactaagagccgatgaaagacgtgataagctgcgaaaagcttcggggaggagcaaatatccattgatccggagatatctgaatggggaaacccggctggacagactccagtcatccatacgccaatccataacgtatggaagggaacccggggaactgaaacatctaagtacccggaggaaaagaaagaaaactcgatttccaaagtagcggcgagcgaaatggaaagagcctaaaccaggatgcgtgcatcctggggttacggactgcagaaagtgactttaaggttaatggaacggctttgggaaagccggccagagagggtgaaagccccgtacatgaaagccgagaagagcgagcaggatccaaagtaccacgagacacgagaaaccttgtgggaagtcggggggaccaccccccaaggctaaatactccttagtgaccgatagcgcatagtactgtgaaggaaaggtgaaaagaaccccgggaggggagtgaaagagaacctgaaaccctgtgtttacaagctgtggaacacccgtatgaggtgaaccgcgtactttttgtagaacggtccggcgagttacgctggctggcaaggttaagcaccaaaggtgcggagccgaagggaaaccaagtcttaagagggcgaaaagtcagtcagagtagacccgaaaccgggtgatctatccatgtccaggttgaagctgccgtaagaggtagtggaggaccgaacgcacatccgttgaaaagggtggcgatgaggtgtggataggggagaaattccaatcgaacccggagatagctggttctcctcgaaatagctttagggctagcctcgatagagatttgcggaggtagagcactgaatttcctagggggcgtcaaagcttaccgaagaatatcaaactccgaatgccgtgtaattgattatcgggagtcagactgcacgagataagttgggcagtcgaaagggaaagagcccagacctccagctaaggtcccaaagtgcgtgttaagtggaaaaggatgtgggatttcgaagacaactaggatgttggctcagaagcagccatacattcaaagagtgcgtaatagctcactagtcgagaggtcctgcgccgaaaatgtccggggctgaaacacgacaccgaagctgaggaatcacgcaagtgattggtagaggagcattgttaacgcgacgaagcggtaccgtaaggagccgtggagtgttaagaagagagaatgccggaatgagtagcgagaaaaaggtgagaatccttttggccgaatatctaaggtttccagagtaaagctgatctgctctgggtaagtcggggcctaaggcgagggcgaaagccgtagccgatggacaacaggttgagattcctgtactgcaatataacagaactgtggggacacggaaggaaagtgggagccggaaacggaaaatccggtgcaagcgaagtaggagtttagcaggcaaatccgctgaacaatccgaaggcgttacgcggaccgaactaaagtagggaagcccatgagccggccgtcaagaaaagccgctattgtttatattgtacccgtaccgtaaaccgacacaggtggatgaggagagaatcctaaggccgacggaagaagcattgttaaggaactcggcaaaatgaccccgtaacttcgggagaaggggtgccacagaaatgtggccgcagagaataggctcaagcaactgtttagcaaaaacacaggtctatgcaaaaccgaaaggtgaggtatatgggctgacgcctgcccggtgctggaaggttaaggggagaggttagacgcaagtcgaagctttgaacttaagccccagtaaacggcggccgtaactataacggtcctaaggtagcgaaattccttgtcgggtaagttccgacccgcacgaaaggcgtaatgatttgagcactgtctcgacaatgcatccggtgaaattgaagtaccagtgaagatgctggttacctgcgccaggacggaaagaccccatggagctttactccagcttgatactgggattcggtattgcatgtacaggataggtgggagacaaagaagtggtgacgccagttgccatggagtcaatgttgggataccacccttgcagtattgggtttctaaccatccgccgtgacccggcggtgggacaatgtcaggcggggagtttgactggggcggtcgcctccgaaagggtatcggaggcgctcaaaggttccctcagaatggtcggaaaccattcgaagagtgcaaaggcagaagggagcttgactgcgacaccgacgggtggagcaggtacgaaagtaggacttagtgatccggtggtataaagtgggattgccatcgctcaacggataaaagctaccctggggataacaggcttatcactcccaagagttcacatcgacggagtggtttggcacctcgatgtcggctcatcgcatcctggggctgtagtaggtcccaagggttgggctgttcgcccattaaagcggtacgcgagctgggttcagaacgtcgtgagacagttcggtccctatccggcgtgggcgtaggatatttgagaggagctgaccttagtacgagaggaccgggttggactgaccactggtgtaccggttgttccgccaggagcatggccgggtagccaagtcgggaagggataaacgctgaaggcatctaagcgtgaagcccccctcaagatgagatatcccattccttaaaggaagtaagaccccttgaagacgacgaggtagatagggcagaggtggaagtgcagcaatgcatggagctgactgttactaatcggtcgagggcttgacctgaacacttaggaaagccgagccaaaggcgagagctgagcttagtgagaaggtcgttcgagagagcaaagcgaactcgaacatccaatcacaagaaagtaaagcaagccaaaaggcagaaaacaggcaggtgagacgcaagtcgagccggaactggtaaaaggcaaatctaagtattacggaaaagtgttgcaaagtgaaaaaaagagatgtaaaatcgtatatgtagttttgaaggtacaataatgttcttcaggattggcccagtggctcagttggttagagcgccgccctgtcacggcggaggtcgagagttcgagtctcttctgggtcgtttgatttactatttatttgtttatgggatcttagctcagctgggagagcatctgccttacaagcagagggtcataggttcgagccctataggtcccattttaaacgttgttttggacacgctgatagcgtggcgctattgctttaagcaattcgccgatgtggctcaattggcagagcagctgatttgtaatcagcaggttatcggttcgagtccgatcatcggctttatggatggattcccgagtggccaaagggggcagactgtaaatctgttggcaccgccttcgaaggttcgaatccttctccatccattaggattattcaatccaatatctaatttaatatcgcggggtggagcagtctggaagctcgtcgggctcataacccgaaggtcacaggttcaaatcctgtccccgctactctatgcccagatagctcacgcactgaacacttgatgaagcgaagctgaatctagtgagaaggcggttcttgtgaatggaatgaacaaggactacagagccggctgagcaaaaatttaatatttatgtatatgtgcccagatagctcagttggtagagcagaggactgaaaatcctcgtgtcgctggttcgattccggctctgggcattgaaacacaattaaataagggtgtgtagctcagttggtagagcacttgacttttaatcaagttgtccggggttcgaacccccgcacgctcatgattgaaaaccggatataatgtatatccggtttttttatgtccatatctccctgcatgttatttttattttattcatctttcggtatctccgtattttttattccatgtgttcgtgattttattttttactgatcaattttataggtgtatatgataaatcatttctagttacagcaattaagtgatatgttttcacaatattgttaatagtaacaaaaggtataacaaattataatgatagaaaatgatcgtgagtgttttaactgtttatagaagggtctggtggaaaatagatgctgctggatatgaaaaatataaatatagcgtttttaggcaatcagatattgtatgatgtgaacttaaatatttcttatggcgaggtaaaaggtctgattgggcccaatggatccgggaaatccacaatagtaaatattttatctggtgtatatccaccggatgatggggatatctatattgatggggataagtttagtggatattccccggagattgtgttaaacaaggggatttttaccctttaccaggaacctagtcttattccggaaatgagtataacagataatttatttgcaggcaattatctaaaaaagcttggcattttttgcaatgataaaaaaatgagaaagaaggcggaagaggttttaacttattttgggcttcctatctctccggacgaaaaagtaagaaacctctcaaagtgtgaaaaagagattattgctgtagcaaaggcttttttaaagcgggccaaattatatattatggacgaacctaccgcgggtatgacatgtcaggaacagcaagtggtgcttcagctggtaagaaatcttaaaaagagcggatcctctgttatatatgtgacgcaccgaatggaggagattcgggaaatctgtgattcgctctgtattatgagagacggaagagtaatattggacgagagtatggaacatgtgacggacagatgtattcagaacctaatggaagtaaccaaaatgaataccgggtatgtaagcaggagtatgttatctgataccattgctctggaagtatcacatttgtcgaagagcggtgcctatgatgatatcagctttcgccttcatgagggcgagattttgggaattgcaggggcaatgggttctggaagaactgctctcctgaaaactttgtttggcgctattaagccggacagaggtatgatatttgtaaaacagaagaaaatagattttatgagtgtttatgatgccatagaacagaatattggatatatgcctgatgatcgactggagtcggggattattccggatttgtcagtattagacaataccgttttaacggaagtaaataagaagaggtctttcttaaaaaacagtaaaaaagagattgaatcattcataaagtttgttgtccagccaggttactatttatctaatccaagccaggcaattaaatatgccagcgggggaaatcagcagaagacaatattttttagatggattgtttcggaatccagtattttactccttgacgagccgacaaagggaatagatattgcgtctaaaaatgaaatgtatcagctgatattagaaaaggcacaggaaggggtatcatttattatcagttcctcagattataaagaattgcaaaggttatgtacgaaagttttggtattaaaacatggtgttttagaagaacatacattttctgcaaacgatttacttacaatggggtgaaaaagtttgggaaattcctattttatagaacgtccaatgcttttaaaaatatgtaaaaataaggatataggagtatcggatgatacggcaggtttagacaatcagatgttatatcttgtctaccgcaacagtatccagatacttattgaagatgaactggtaaccctgtttgagggacaggtgcttttatccaaagcagatacttccagaaaagtaatccagatgaattccggatattttcagctattattcagtgaggcggttacatttaaaggtaagttaagcggggaaattttcattgacagcggggtgtatcaagtatttgaaatttctgaggatcttgagatctgtaagtttttgtgtgagagaatgctgatagaaattgaggatgagaatatttccagagaattggctgatactttattggaaggaattttgtccatactctgtaagacgctgagtagtaaaagcagtatccaaagagactttattgctattacaaaagaatatatagagaaacattacaaagaaaatctaagcctttcagagcttgcggaccatgtaaatgtaagtgtatatcatttgtcacatatgtttaaggaagaggtgggaatatctcctatacagtatgcaatcttctgcagaatggagtacgcaaaaaagcaattgagggaaacatcatgttccgttcaaaaaatagcggtggaacttggttatgaaaatccgaattattttaacctgctttttaaaaagactgtgggaataagccccggaacctatagaaaagagtggaaaagacgataattacagagtgcagagtagataacagagatgttatttattctgtttttttattttaatttaaagatgacaatataaataagaattataagctctagcaagaaagttatataatttgcacaaaaatatatcataaaaacaaaaatataatataatttgcacaataatattaatagttttacataagtatttgggatattatgggtaatataaagaaggatcatgattcttgctataaaaaaaaggaggaagtatatgtttaagtacagttatgatgccctggtttattatggtgaaaaagcaaaagacagtattgagaggtgtgcgaggtatggatatgatgccattgagctatgtggggaaccggagtattacgatgtaaaagaggtaaatcagttgtgcagggacaataagattaaagtgtcttcgatctgttctgtttacaatgaagacagagatctggcacacccggatcccggaatgagagaacaggctcttgagtatgtaaagaaggtggtagactttgctgcatctatcgactgccaaatggtaatagctaatccaactgcatgctgtaaaacagtacctctggctccctatgaagatgaatataaatggggtgtggaaggaattattaagggtgctgagtatgcagccagggcaggtgttaatctttgtctggaatgctggaaccggtatgagacgtatatgctgaaccgtctggagcaggcaatggatatgctgaaagatgtaaagatggataatgtaggcgttatgggagatttgtttcacatgaatattgatgaggctgatattgcgcaggccatccgggattgcggcagcaagctgacacatattcattttgcagattctaacagggctgcgccttccaaagggcaccttgattttgctcctataatgaaagcgctgcaggatattaagtatcaggggtacattacctttgaacttctgccggcaggggcggacccatttggaacattaaaagccggcggtggaaaagaattttttgatgagtatactgagctggctatcaaacacataaaagccattgagcaaactctctaaataaggtgtggtgggtatggaggttatactaaagcatattacaaagtccttttcaggtacaaaggcattggatgatgtagagctgcacctgaagggcggggaaataaattgcctggtaggagaaaatggagcgggaaaatctacggtcattaaagtactcgccggtgcacatatgccggattcaggggagatccgtatcgatggacaggtaactgttttgagaaaccccagagaatcccagatgaataagattgccgtcattcatcaagagcttttattagtaccggaggtaagtgtagcagaaaatatatttttaggtgactggcccaagggaaagacccgttttttggaccggaaagggatgaatgagagggcatccggtatacttgccaggatcggagccaatataaatcctaggagcattgtatcttccctctccacaggagaacagcagctggtcgagatagcgaaggcactctctaaggatataaaagtactgatattggatgaacccacagcttccctgtcagaggtggatgccaataatctgctcagaattgttaaagaactaaaaaatcagggaatagctgtcctctatgtatcccaccgtctggaagaggtttttgcaatagcagataagataacagtattccgtgacggaaaatatattggctgtgtgccaggccaggatgccacgaaggacgagattgttaagatgatggtaggaagagaagccgggaacattgaggtcaggcatcgggtgaaacaaaaagggaaaaaagttctggaggtaaagcatctgaccagccggggaatgtttaaagatatttcctttgatttatatgaaggagaggttgtgggactggctggtctggtgggagccggacgaacggaaatagtacgggcactgtacggcgcagatgcctatgacagcggagaaatattggtgaatggagaacgcaggaattttcatcaccctgcagatgctattagggaaggaatttccctggtgccggaggacaggaagactcagggtctggtcttgggacagtctgtggagcataacatacagctgggaatactgaaaaaaatcagcagttatgggatggtacagagaaagcaggggagagcggttgtcgaggattacaggaacaagctcagaattaaaacagtttctgtggaaaccgatgtcaattcattgagcggcggcaatcagcaaaaggtagtattggccagaagtctggccatggatcccagaatattgtttcttgacgaaccaactcgaggcgttgatgtgggcgcaagagaagagattcacaaattaattgatgaggcggtcaaaaatcgtctggcagtattgctggtatcttcagacattctggaacttcttgctctaagtgatcgcattgtggttttgcgggaaggacagatagcggggaaattcaatgaccataaggtttcaaaggaggaggtgattaaacttgcagcaaattaaaacaaaatcaggacagctaggacagattctggataaaatggggctgtttcttgtgttgttggtatttattattgtaatgtctgttttgactcccagttttctcacatggaataacctgagaaacctgctgattcagtctactatactttgtacgctgtctctcggggtaacttttgtaattattaccggagggattgatctgtccgtaggatccgtggaagcggtagcttcggcaataggaatggctctgattgtaaagacaggtttcccgccatttgtaggtgttttagttatgcttgcagtgggaattgcatttggtatcatcaatggttctctggtaacacaatttaggattcctccgatgattgttacgcttgccactatgagtattgcccggggtattgtactggtgtttactaacagtgcaaacataggacctgtgccgagagcttttacggtgcttacttcttcttacgtaattgggattcccctgattgtttgggtagtggtaatcttctgtataatagcctggatctgtctctcgaagactgcatttgggagatctatatatgcagtgggaggcagtgaactggcggcaaagctggcaggtatccggacaaagcgtattatcattatggcctatatgatctcaggtctgtgtgcagccattgccggtcttcttttaacgatccggctggaatccgcgggccccaatgccggtgacggtgtggaaatgaatgccattgccgcagtagtagtgggtggcacaagcctgtcgggcggacggggcaccgttatgggtactgtcttaggtgttattttgatttctcttgtctcaaatgcggttaatctattgggagttccccctgcgtgggataagattgtaaaaggtgtagttattattattgcggccttactggatgcaaacagaaacagaattgggaaacgctccagataagggaccagtgtgaaggaggatttttatggtaaagaaaagaatactcagcgttatgatggcagttttacttgttgcagtgcttgccgctggatgcggaaagaatgacagtgcagaggagacagaaaataaggaggcaacagatacagcagcagaacaggaaccggaaaagaaagatacatataagatatctgcactgctgtacagccgcggatttgaatttatggtggcgttggatcaggggatccaggataaatgcaaagagtatgggattgaggtagaagtgttggatggaaactctgacagttcgacacagattacacagattgaagacagtatcacaaaaggtgttgatgctattttgctggctccaaataattcggaggaactggtagcaggcgtaaaaaaagctaacgatgcaggggttcctgttgtagttctggatgggaatgtggcagagggatgtgaggtgttggcgtcctgtacctttgacaataaagccggcggaaaaatggctgccgaacatcttatggaaattgcagagccatgcagtgtgctggaatgtaccggtgcaacaggcgcttaccatgcagtgcggcggggcggaggctttgaggatgagatggccactaacagcagctacaaagtaattgccaatgactgtaactgggatgcggagacagcccagaatgctactgttgatattttatcctctaacagcgaagttaacgcggtgtttacccataacggagagatggtcagaggtgtcattgcgggattaaagcagataaaccaattaaagaaagtaggggaagaaggacatgttcccgttgtttgtattgacggaacaccggcagagctggattatatccgggatggatatctggacgccactgtggaacagaatccttttgatatgggtgctttggcagttgatgtggcttataagtatctgaatggagaggatgagaatcctgaaaaggaacagtatgtatatcccagactcattaccagcgataatgtagaagatccggaaaactgggcaaatcagatcaagtagttttatatacataaagaagggtcgaagatcatgaagagaaaacttaaggtaatacagataggaaccggaagctggggattcagctgggtagaaaaggcacttcagtctccctgggtggaattggcggggctggtagatatgaaacaggaaatgctggattacgcagtgaatacctatcatctggatccctctatttgctttctgacattaaaggaagctgtcaagcatgttgaggcagacgctgcctttgtagtagttcctccggcttttcataaggaggttgctgttgaggctttggagtgcggactgcactgtctggtagagaaacctctggctgaagagatggaggatgcgcttaagatggtgctggcggccgaaaaagcaggaaaaaaattaatgatcagccagaattacaggtttaaaagggctccccagacagtaaagcaaatagtggaaaaaggatttgtgggggaaattggaagtgtatttataaactttcaaaaagcgcctcattttacaggatttcgcacagaaatgtttgaacctctgattcaagatatgagtattcatcattttgatcagattcgtgggattctgggattgaaccctgtaagaatcaaagcacactcctggaataccagctggagctggtttaagggaaatcctgcagccagtgttatttttgaaatggaaaacggcgctgttgtctcctataacggcaactgggtttcccagggatgggagactacatgggacggtgactggaggattcagggcagcgaaggggagattcactggcataataatcaggtaatactgcatccttccgatctttttgtctctgtattccaggacggagctgtggagaaaaacggggatcttgtgtttgatctggctgctatggaggaagaggaaagaatggcctctattgcagaatttgcagcggccattgcagagaacagagaacctgagacaaatggaagggataatctttatagccttgccatggttctgggcgcaaaatatgcggcaaagaccggagagagtgtggaggttgcggatttattagatccccggcattttagtaaatattctcatatagacgattagtttgacggatgtctcctgcgcctccccgctgttttcggagggcaggggcagtcccgggaggtaaaggatatgataaaaattggtgtagccggatgcgggaagatcgctcaggtgcgtcatcttccggaatatgcagaccggaaagaggtagtgatcgcaggggtttatgacctgaactatgaaagggcctgtgaagtggcatcccggtatgaagccacagcgtacaaagattttcaggacttgctgagggatccgtctattgatgcagtaagtatctgcgtggcaaatgcatttcactgcgatatgacggtggaggcactcagggcgggaaagcatgtgctttgtgagaagcctatggcaattaccctggagcaatgtgaaaaaatggtacagacggccagggagaccggcaaatttctcatgattggccataatcagagactggccagggctcatgcaaaagccagggaactggtacaggcaggggagattggaagcattattacgttccagacaaattttcagcacagcggtccggagacctggaccattgacagcagccagatttggttttttgataaaaagaaagcggctttcggtgcaatggcagatttggggattcataagacggatctgatccagtttcttacgggacagagggtacatgaggtgatggcttatgtgggaactctagacaaacgggacaaggagggcaatttcatcggtgtggatgacaatgccgtttgtatctatcagatggatggaggctgtgtggggattatgaaggccagctggacctgttacggacaggaggataatcacaccgtgctgtacgggactgagggagtgatgcatatttacgaggatccccggtattccatagtcatagaatataaggacgggactcgtaccctgtacgaggcagatgaaattcagaccaatgatcatcagaccaaatcaggaattatagatctctgggtagattgtctagttaacaatcaggaacctgccatatccggggaggaggcactttctgctatgaaagcagtttttgcggcaatggagtcagcccggacaggaaaaaaggttaccgtagaataggaggtaaatagtatgagtcgtccaattacgctggcttccgggcagtttggagatatgtcattagaagccttatgcagtttggcagaatctattggctatgaagggttagaattagccactcatgcgcattttaatgtacagagagccctggaagaaaagggttatgtagagtatgtacaggcaaccctaaaagagcatcatctttcttgttatgcaatctctgctcatctgacagggcagtgtgtgggagatgtgtgggatccgcggctggataattttgcgccctccagtatctcaggacagccggataagatcagggaatgggcagtagaggaaatgaaacgcacggtaaaagctgcccatcttatgggggttcaggtaattacctgctttacaggatcccctttgtgggcctggtggtattcatatcctcagacaacaaaagaaatgatagagcaggggtatcagaggatttatgatctctggtctcctatatttgacgtctttgatgaatacggaattaagtttgcacttgaggtacaccccacagaaattgcctttgattattatacaacagaagcactccttgatacattcagacgcagaccgaccctggggattaactatgatcccagccatctggtgtggcagggagtgaacgagctgacttatctgcgggatttttccgacagaatctatcatgtgcacatcaaagatgtaaagctgaaccagaacgagagggccggaatcctgggatctcatctggagtttggagataccagaagaaagtggaactttgtatccgtaggacacggggatgtggactttgacggaattatcagggaactgaatcaaatggggtatgagggaccgctgtctgtggaatgggaggactccggaatggaacgggaaacaggagccagggaatcctatgcatatatccggaagatgaatttttcaccctccggcattgcctttgacgcggcgctgaaaacagaataaggaggatgctatgtaccggtatagtatgacccagtggattgtgggaaacgaaaagatagaatatagttttgagagactgaaaaaatacggttatgacggcatagaatttgccgcagagccatataccacggatcaggataagatggttgatttactggaagagtatggtttaatctgtacctccctgtgcggaatctttacggaagacagggatttaacctcaggggaacccggggaggcagaaaaggcggtccagtatataaaagataatgtggattttgcaaaaaaggtgggagccccgtatatgattgtggtgccctctccggtgggaagaacggaaccactccccggacgctcctatgagacggcctgggccaatgctgtgtctaatgtacgaaaagcggcagattatgcacagacccagggaatacgcctggctgtcgaggccattaacagatatgaaacgtatctggtaaatacactttccaaggcgttggcatttgtccgtgaggtgaatcatcccgcagtggggattatggccgacatgtttcatatgagtctggaagaaaataatataggagccagccttcggatgatagctccgtatcttatgcatgtgcatattgcggataatacacgggaggcggcaggtctggggagcacggactttaaggagatgttttatgttctgaaggatatcggttacgaggggcctataactatggagtttatgcccaggctggcgaacccttatgcctccggtgatatggaaacgcagtcgaaattaatggatcagtatgcaaagcaggcaatctgctatatgaaaacattggaaactagcataagataaaaaaaccgggagtctgcagagtgtctgcagttctcccggttttttcttaatctacaggggatccttagcaatggactgcagtactttcagagccgcccgatcatcgtctgtaaatgcaaaatgttcattaattgctttttgggccagttccagatccctggtttttattgcctcatacaattcgttgtgttcctgctgcagcagatccttaggataggcatcttctattatcttagatacaagagatatattctggtagtagagtttagacagagcgtttaaaagaaatacaaacatgctgtttccggaagcctctataattttggaatgaaactgccgatcccagccggtccgttcctttgatgtggcactggaattgtaatgctcaataatttctccaagctcatggataatatcgtcattgccctgttcaataatatttctgatggattcagactcaatgcaccttcttaactgaatcaaatcttcgatttttccattattaagtgtgtacaggagtgaaaggttattggtcgtccgttcctgtaccttatttacaataaaattgcctcccccctgccggctttcacagatgccgatcacctccagggcttttagcgcctcccgcacagaggtgcggcttacaccaaatttttcagagagttctttttctgtgggcagccgttctcccacggtaagctcaccgtttataatcatatccttaatctgttctacaatgtattcataattctttttatttccaatgtgattaaacatgacatcctccaatttgtgcatctcttacatgataccgggtaaaaagtaaaagatagtgtgtcgtattttgtataattgttataattttaccatattatacagaattaataaagcattagtgctaaaggagttaaaaagttaacgatgaaaaatgcacaataaatattgacatgcaaaagtttctgtggtagtttataaccataataaatttgtatgacaatattacaataacataatattaacaataaagaaagggagaaagtaataaatatatacaaaagcatcaattgtaatttggcatgcaaataaacggtggaaccaggcggtaaaaagaaaggagttatgggatgaatagcagagcaaaacgttacattgcaattactgcgttggggttggtatatggcactatgtttaacctgccttatatcaagtatgtattctatgatgccatgattgatggaatgggggtaagcaatacaaagctgggacttcttttaactgtttacaccatagtcagcacggcaggactgcttccgggagggtggattgccgatcggtttaagacaaaagggattattgtaggaagcgcatttttaaacggaattatctgtattttctttatgtttaccatgaaaaactatgcatgtgccatgattacttggatcgtatctgccatagcaggggttactgctttctgggcggctatattaaaggcggtacgcctgatatcaccagaggatgaacagggaagagcctacggtttctgggaaggggtctgcggcctgtcggcaacaatcggcaattttgtagccttgtatgtattttccagatttgacaattctacagcagccctgaaaggggcagtggcaagtatgggtgtgatgtgcatcatagggggacttctggtatggtggctctacgatgagaatatgacatctacagatgaaagaggagaggagagaaagacagtaagtattaaagaaacatttgctgtctttaaactgccgaagctttatctgagctgtatcattgtcttctgcagttacggattcttcagcagccagtcctttttaactccttacttcaccaatgttttaggtgccgcagtgaccttcagcggcgtacttgcaatcttcagaagctacgggctgaagatactgggaggtcctgtaggaggtgtgatagcggataagctgcactctccgtcgaagctggcaatcggctgctacattattatggcagcagtggtaatctacatagcgaacgcgtcggggggaagtgaactcatcactatacttaccgtattatccctcatacttgcaactgtatgttttatggcaagggggactatgtgggcaaccattgcagaggcagagattcctccggagatatcagggacggccatttccgttgcctctatcatcggatttaatatacccgatactttcctgcctccgctgctgggcagctggctggacaaatacgggaacacgggatatcagtacatcttttactttttgattggattgtgtgtaattggggtcattgccgcattgtcactgatatttgccaataaaaggacagctgcaaaaagaatttcagcaaattaatctatagagtttaccggaaagggaggatattatgcaaaaactgaaactgaacattgaacgctgcaaaggatgcgggtactgcgtagatgcctgcaaacaaaaagccttgtcacagccgggacagctgaacaaaaagggctacagtattgtagtggcagacgaggagaaatgtattcaatgcggaatgtgctaccgtatgtgtccggactgtgtgtttgagattttggaataaggaggggaaaaaatggcagcagaaaaagtcatgatgaaaggaaacgaagcattggcagaagccgcgcttagggcgggctgcagattttacagcggatatcccataactccccagacagagatcctggaatatctgtcctggagaatggaagaggtcggcggtgaatttgtgcagacagaatcagaactggcaggaattaatatgctctacggggctacggcagccggggccagagtacttaccagctcagctggtccgggatttgcgctgaagcaggaggggatctcctatctgtgcgctgcggatttgcccgctgtcctgatcgatgttatgagaataggaaacgggctgggtgatattgcacaggggcagggagattactggcagcttaccaggggcggaggaaacggagactacagaaccatagtccttgcgcccaacagcgtgcaggagagtgcggacctgatttatgaagcctttgatctggcggaaaaatatctgcatccggttattattggatccgatgcggccattggccagatgatggaggcagtgacctttccggagatgaaggaacacaacattgataagtttgactggactgtgaaagggtgcaaacccggggatacccagagaattatatctaatgtctgcttctatggacatccggactatgaggaatatctgagagaaaaatacaggaaaattgaggagaatgaacagcgctgggagagcatgcagacggaagacgcggagattatcctggtagcctacggcatctcctccagagttgctaaggaagcagtccgcaacggaagaaaacaggggttaaagctgggtcttatccgtcccattactttatggccctatccggttcaggcattccagaatttatcggatcactttaaaggatttatcagtgtggagatgaatattctgggccagatggtggatgacattaagctggccacagacgcaaaatatccaattgaattctatggtactttctttgatgtacctgagagtgaacgaatcattgaaatcgcaaagacaatggcagaaagatagggggttatgtcagtgaaattaaaagcaccggaaacagttacttttagaccaacctcattctgtcccggatgcggtcatgggatcgcagccaggctgataggggaaattatagatgagatgggactgcagcaggattttattcccaccgtggatgtggcgtgcggagcgctgaatatggatacctggcgttttgataccgttatggctgcacacggcagacccgttgtggtggcgatcggagtgaaaaaagtccgcaaggataaactttcagtggcttatatcggggatggggcagcctatgccataggtatggctgagacgatgcacgccgcattgagaaatgacaatgtcgttgtaattgttatgaataacggagtatttggaatgacaggcggtcagatggcgcctactaccttgattggacagaagacaacatcttccccgaagggaagagatcccaaaaagcagggggaaccttttgatgtcgtaaaagccctgggagagtttgatattgcatatttggcgagggcgtccctggactgtccggcatcggtcaataaggccaaaaaatacataaagaaggcatttgaaaaacagatgaataacgagggattctgtctggttgaaattcttgccccatgccccacaaactgggggctgtcaccggtagacagcctgaagcatatccgtgaaaagacgctttcctactataagctgggagaattcgtagataagaaaggagaagaaaaatgacagaaattatttgtgcgggattcggcggtcagggtgtgctgatcaccgggatgattctggcctactgcggtatgcaggagggaaaatattttacctggtatccttcttatggctcggagatgcggggaggaacagccaactgcaatgtgaagataagtgaggaagagattgccagcccatatgcaaaacatttggatattcttgtatctatgaatgatgtggcgattaataagtttgaacctactatgaagccgggggcggttttgatggccaatagttctcttctggcagaggacagagtgttcagagatgatatcagggttgtaaaagtcccggctacggagatcgctgccaggctggataatccaaagggaaccaatattgtaatgcttggtgcactttgcaaggctacggggctgtttgaggaagaatttatgaaacgttcaatagatgaatattttgctaaaaaaggcaaagttaatcctaagaatgctctgtgctttgatgaaggattcaaggcagtttcatagaaagtaggtgctgagatggatttgaataagctgctgaaagccaaatcacttgcggtggtaggcgccagtgaaaagccggggttcgggggagatacctgcaggaatatcctggagtacaggaaggatttgagcagagtgtattttgtaaaccctggcagagaaatggtgctgggaagaaaatgctacaaaagtctttcggagattgacgatgaggtagaactggtaattatctgcacctcacaggccacagtatgcggcctgctgagggaggcgaaaaccaaaggctgcgggggagcggtcgtctttgccagcggctacagtgaaaccggagatgaaaaaggaaaggctgcggaagaagagctgaagtctctggcaaaggagctggacattgctgttttgggtccaaattgtggaggatttaacaattatgtggatgacgtaatttcttttgcatttcctgtggaaaagagagacagaaaaggaagcatcgggttcatatcccagagcggacagttttgcattaaccttatggacagcagtgagatgagattttcttatgcaatttctataggaaatggaaagattgtaaccttggaagactatctggactttttggttgaggatgaacatactaaggtcatcgcagtctatatggaaggcgtccaggatgcggaacgtttcgcttcctgtctgcgtaaggcggcccaaaagaaaaagcccgtcattattcaaaaaggcggaaaaagcgaaaagggcggcaagattgcggcatctcatacaggagctcttgcaggatccgacagggcctatgatgcggtatttgacaagtttggcgtaatcagggcagatgatatgcaggagatgatgtcaacggcactgctgttatccaccttaaaaaatcttccggaaaaggctgcatttgcatccatgaatatatccgggggggagaccgccatctgtgcggacatgggcagtacttttggaatcaactatccggattttgaggaaagtacccttacaaagttaaaatccatgcttccctccttctgtacaccgggaaatcctctggatatgacggcagccctctgttatgacagtgacttatatgcagaggggctgaaggtggtcatggacgatcccaatattgagatggtcctcataggaattactatacagttagtagtggcagatccaaccatatacaatatttatcacggggtaaagaaggttgtggatcaggggtataaaaaacccattgctatactgccctttattgagggaacgcgaaaccgggatgttgcggagaaattcagagagattggagtccccattcttcccagcccaaagtatgctttttcggctctgagtcatctttctaactatatagggtatgacagcagcaaacgggagctttctctggctgtgcccaaaaaagcaactgcagggaagaaacgggcattaagtgaggtaaaaagtaaacagatgcttaaagaaaatgggatatctctggatctcggagtaatcgttacaagcagagaggatgccctggagaaggcaaagcacttcacctatccggtggtcatgaagatagaatctgacgatattctccacaaatctgatgttggaggcgtgatcctgaatattaaaagtgaagacgagatagggaaggcatatgatacgattttggaaaatgtaaagagcaggatgccggaagctaagattaacggaattctgatgcagaacatgatgcctcaggggactgagctgattcttggggtaaaaagagatgcacaattcggacctatgctgctggccggcctgggaggcgtattcgtggaagtgttcggtgacagctctctgtaccccatacctctgaataaaaacgaagcatatgagatgctgaagtccctgaaatcgtataaaatgctcaccggatacagaggcacaccgcccagagatatagatgccgtagtggaaatgatggttgccatatcagaatttgcccggaagaacaaagacagactctgcgagctggatataaatcctctgttcgtgtacggggaaggtgccggagttggtgtggcagatgcattagtagtgctggaagagtaaagcttcctgcggatggaggtgctggcctttgaaggggattgatatctgttttgtagtaatttatatggcaatgatgctgggtattgggatttatacgtcacggaagcaaagcagcatggagacatattatgtggcaggcaggaagctgggcacgttttccatcgcctgtctctggatctcctgctggatagggggcgcctcggtaataggaacctctacaaaggcttatgatatgggaattactgccatatggtatgtgggaatactggctgtgggctgcggcttgttttctctggtattttcaaaaaaagtaaagcaaataggggatcatcttgaaaatctgacctatccggactttattgagagcaggtatgatcacaggtgcagattcgtatctaccatctgtaccctgattgggatgattggagtaacagcatcacagcttgtggccagcggagtgatcctgaacacaattacagggtggggaaatgggatttcttttacagtggcagctatagttctgatcttatacactgcattgggtggatatcttgcggtaacctatacggactgggttcaggtagggctcttaatgctgggagttatcttagcagtcccctttgctgcaaacgcaataggcggagcaggtgagatccggacgctgccggaaagctattttgatgttggggcctggggatggcctactattatagcctttgccctctccaccctgctttccttttttaccaccatggacagctataccagatgtatggctgccaaggatgctaatacagcaagaaaaggcggctttatcgctgccttgtgtatcctccctattgcactctgtgctacgtatgaaggtctggcagctaaagttttaattccggatcttcccgcaggaagtaactctctgattcaattaatattgatgacatttcccagcggaatcaaggggctggtgattacgggaatatttgctgctattatgtcctctgcggatattgcaatcttaacagcgtcggcaaatgtgaccagggatatctaccaaagatacatcaacccaaaggcttccgataaaagaattgtacgtctcggaaccatcagttctctcattataggatgcatcagtctgttatttgcatggctgaatcctgatattatggatatactgctgattacgtttacttttttatcggcgggactctttattcctacattctttgggtttttctggaagcgcggaagtatcagtgcagccttttacagcatgaccttctctctgttaaccgtaatcgtatggtatatgggacggtcaatgggatggggatctatttttaatatagatgctttatggccgggcctgggagtatcagccgttttgttttttgccatatctgtgctgagaggccagaaggcagaggaaagggaaaagattcaacattttttatcttaataaatgacggaaaggaaggaagtctatgaaaatcataattgcagaatatccggaatccgcggaccgggatctcagtatagagaaagaggtatttcctgaggatgcagtgctggagctggctgtgtatactccggagacagaggacgcctttattgaacagtgcagggatgcggatgccatcctggttggatatgtaggaattaacaggagaattatcgacggactggaaaaatgcaaggttatctctgttcaggcgaccggatggaactatgtggactgggaatacgccagggaaaagggaattgcagtctgcgccataggggagtactgtacacaggaagttgcggatcacgccattatgcttatgctggcactgctgaaaggcctgaaaacgtatgagagaagtgttcagacagacagacaatggatttataacgcaaagcccggcgtaaaacgcatcgaagggcttaagctgggaattgcaggatacgggaagattggaagggctgttgcaaaaagggcacaaagttttggaatggagatactggcttacgatccctatatacctgatgaggccatccgggagatgggagcagagcctgtgacaatggatgagctgctggaacaaagtgatgtaatcactattcatatgaatctgaccggagaaaatcagggaatgtttgacctggaaaagttcaagaagatgaagcgcagcccaatcctcctgaatgtggccagaggaggtgcggtaaaagaagaggatctggtgtatgcgctggatcacggactggtgagcggtgcggggctggatgtactctcttccgaaacaccggatatgaatacgtgtcccctggcgggaagggaaaatgtcattatcaccccccacagtgcgttttattctactaccacagaatatctgctgtataagattcctgcggaaaatgtacttcgttgtctggagggaaaatataaagaggcgaacagagtagtaaatggggttggattagagtaaggaacgttggaaaggatgcctgttttccggagagatctccgatgtgagcgggtatcctttttattgccccaaaatgaggtttacagtaaatgcccagttgaataatatctgacggaaggatataataattctagcaaataatttaatatgatgaagggaatattctgttatggaagcagtacaaaaagggaaaaaggaacagtttgcctcagacacttcagcaaggacggcaaaggattgggccaaggcattgctgattctcctcattggccttacagtggcccatctgggggtgacactctttcttctgtcggagctgggaacggacacattcactgtatttatccaggggcttgccaggaatgtccatctgacggtgggaacggtacatgtaattgttctgtgcattttaatgatcttcatggcggtgacaaccaaagggtacataaagcccggcacaattctgtgtgccttctgcggggggcctattattgatttgttcatgtgggtatttcaggattttattaatgggaatgcatctatgggaatccgtgtggtcagtatggttgcaggatgtattattctatccgcgggaatgtccattgtcatcaacagcaatgcgggtacgggaccaaatgatctggtggctatcattttatcggataagattgcgtccgtacagttccgttgggttcgggttggatgtgacttgttttttgtaacattggggtatattctggggggaaccgtgggagtcggaaccatagcggcagttttcctgacaggaccccttgtgcagttctggctgcccagaacgaaaaagcttctgcctgtatgctgatgaaaaggaggcgctcctattagaaccggtgatttacgtatatggaagaaacttacacctatctttatctcagaatttgcatctatcttttactgtatcgtatttacccctctggggtatattctgaaggattttccgggacaggaaaaaacggtatatttaatggttactctccccgggattgcagctatgattgggggatttgcttctgccggccttatacagagaatgagcagcaaatctttagttgtgggttctattattatgacaattgtgggaggattcctcatacgatttaccgggatccgcagtttgcctgtctgtattgcaggctctgctctgacaggctttgcgtcaggggtaatcccttccgcaaatttagcagctctggcggagattgcccccgggaatctgagagataaggtgtgcggctggacctgcgtatgcagtaatctgggatttattgtgtgcaataccatagccggttacagtgcagcaggtgggaactgggcgagggcattcaatgctacttttgtgcttcttcctgtattgtttgccgctattatctggtatccctcaggaaaaaggagtatccccaaagcagaggcggacagagacgccgggaaacgtactgtcatccaaaatggggagaggatgccaaaatgtattatcggcctgattgttgttaagtttctgtctgctatgttttacatgtcactgggactgaatgcatcaagctacattatcaatgaactgggtacaggaacctctgctcttgtgggcaatgtaactaccgtgaataaagtggtaggactccttgtcactatgtttttgtttttgtggctgaaagcttttaaaggtgcaagtacagcggcagcaggcatagtgatgggagtctgtacacttaccgttgctctggttcccggtaccgttggatttgtagcaggttatagtttgttaaatttgggggtaaatgcgtaccatgcagcccagggaactgtagtggctatgacacctaaaggtaagtacgtgggcattgcctcgggaatgtttatcggcgctacttactgcggggaggcgttgtgcgcctatgtggcgccgtggacgggtaaacttctctttgggtcagatctgccctcggcggctataaaagccggagggattttctgtattctgtttggtttgattagctatccgttttttagggaagcatataaaaaggcttttcccggaaggtaaagtgaaaggatgccgcaccatatgaaaatgggggcatcctttcgttaactgagggatccgattatgtgaaaaataaggttacagttttgcaagtgtctccatggcatgctccgcaatgatgcagtcgtgatgctcttccatgtaagccttctgtgcccgggagattgctttcaggggggcgaattctgtccacacaatgccgcaggtattcatctgctgttcattgtctgtgtcaggatccgccaaaatatagtattggttatctacctgataaagggaattgactacctgaacccttccattgagtatcctggaagcatgaatgacgtcgtctaagctctcaaatcggtacagcaggaagagatcctgcccgggttcaattatattttccggaagctgctgattctcggcaagctgtttcttctttgttatcgcaaaggaaaccttttcttctgacatctcagtcagctgacaatacaggagataaccttcaacctgaaactgaaaatcctcttctgccatctccagagctctttgaaaaagtgtctgaacttttgttgttcccaacaggaaatcctggagcttcagctgattctcaacaaaatcgttcttgtctaaagaccacaggaactgggaatcattaattttttcaactttcatggttatcctcctctctaatctatgaaaactaagtgatagttaccgcagtataataattaatctattgttatatatataatataataaatagaacatgaaaggtcaagtactattttaatatttcatagaaaattaatttttcttctaatttctgttaaatatcttgagataatgtataatatgagtatatcaccttaacggagaggagtataagatgacagaggatgtaaaaagagcattgagtgtaattgcccaggtaaaaaaggcagttatgggtaaagatgcctgtattataaaaacaatgacggctattttggcgggaggtcatgtgttgatagaagacattccgggagttggaaagacaacccttgcccttgcgttctccaaagctatgggcctggaacaaaacagaatgcagtttaccccggatgtgcttccggcggatatcaccggattttccatttacaaaaaagagacaaattcttttgtttatcagccgggagcggtaatgtgcaatctctttctggcggacgagattaaccgtacttcacctaagacacaatctgcccttctggaggttatggaggaggggaaggtaactgtggacggtgtgcagcaggagatcccccgtccgtttatcgtgatagccactcagaatccggtggggagtgccggaacacagatgcttccggagtcacagatcgacaggtttatgatctgcatcagtatgggatatcccagcatgaaggatgaaatagagatcgcaaagggtaatacttccggtacgcctattgaggatgtaaaaactgtaatttcaagagaagatctgcttcatcttcagaaggaggcgggaaagattttcattcacgatgaggtttacgaatatatcggaaagctgatacaggcaaccagagaggagcctcttattgcgctgggaattagcccccggggaacgattgcacttaccaaaatggctaaagcgtatgcatttctccataagagagagtatgtgataccggaggatgtatcatatgtattccctgatatagccgtacaccggatctgcatgaattccaaggccagaatcaaccatgtgacagaggagaagattattggacagattctggaacgggtgagacgtccatctgtgcggagaggttactaaggatggggaagattattagttatctgataggggttctgctgacactgttcttctctttaatgtataacagcagggaactgattatgctgtttttggcagagattctaatccctttttttatgctgatatttatcagctatccagcaggcagaatgaaggtgaagatgacggtgctggattccgtaattacaagaggggaaggcacaaaggtggcattggagctggacaatcctactagctggatactcccaaaagtagctgcacggatacgttataaaaatatgcttttgggtacagagggagtatttgtaatggaagggcttgtaggagggaagagccgggtaaggctgacctgccccgtcaaaagcgatttctgcggaaaaatccttttgactttggacggaatccgggtatacgattatatgcactttttttctgtcaggaaacgaaaaaccgggtcagaggagcttgccgtacttccaaaaggatatgaaacctttgtaaatgtcagcagagccaccagggaatttccggtggaaggggaggaatatgataaggaaagaaaaggggacgatccttccgagatctttcagataagagaatacagagcaggggacaggcctcagaggatccattggaaactgagtgcgcgttcagaggaacttttggtaaaggagtacagcaggcctttaggctgcgcagtagtgctgtttctggatttccggcggtaccggaatggaggagatgtgaatggactgcttgaaattgcactttctgtctcactggctcttttggccggacattgtatgcattttctatgctggtttgacagggaagcacagaaactcattcgggccaggatagagaatactgacgatatctatgagatgctggagcctctcattcagattcagctctatcaagaggaggtagaactggaacacctgtatagggatcaatatcccggggagaattacagtacggggattcgtctgaacctattgctggagctgtatcttaaggaaagcttatgggtaaggtttcgaggcgaagggctggaggatgaacttcagggaatggagctgacagtatagggggtataggagacagaatttatgtttagaagaaaaaaagggaagacggaggggattaccgtttccccgtataccagtattgagattattgacggaaataaaaaaaggggcggcggtacagggacattcttgttaacggcgtatctttttctgttttttactggtgtggcttatgcttgtatcagcttggcagaactgccggtctccagggcggggatcctgccgttctgcctggcctcttcgttggtgttcggcatagccgcctttggaacttatcccaaaggtatattctatggtcttgtttttttggtgacaggaggcataggatttataggccgggataccctcgcctatgggttttgcgtgattgccaacagggttattgctgagattaaccggtactacagcggcaatatgggaatgtttcctgtaaatgacaatgacaccggagcctgtaccttaagtttctgttttggaatgtttgtgcttatgtggggaatctccgcagttctgggttattgggccaggaaatggatattgggtgttctgatcgtgtatatcctgtgggcgggcctgttaatgggcagggttccctcggcggtgtccctgggtatgctggtgatatcttactgcgggatgtcagcagttatctctgcaagaaatatgcctctggaaggggacaaaaagtctgtgggagttggcagcccggggctttttatggggattcttgccgggattctgctattgattgccggtgttgtactgacaccagcggcatccccgggaattttaaaaaatcagaagaaggtgtaccagacagtaaatcgaatcgagcagcggattatgtccggacaatttgaagattggaatattttttccaatgtttcccttcccttttatacatccagcggtatgctggacaacagagagattaagtacaaaggggaggaagagctgtatgtcacgttagaggaaagaccggagcgtgatatttatctcagagggtttgtgggagatgaatatatgggaaaccgatggaatcctgtttcaggcaacagcaatctccgttcccatgagatacagaatatatcctatgattttttgttatttaatgccccaacagaccggaggctgtccagacaaactatggggatacagattgtgaatgcagattcctctgtgggatatattccttactattcttatatccccgaaagtgcggtgacagagggagacggtgccgtcaggatcagctcaggaaatatgcaggaatacgaggggtatttcagcaattttgagtgtctggagtggccttctgtgacggataacgggaccgtggagccggagtaccgggcatttgtttatgaacagtatacactgttgccccgggaaggtctggaccgtctgcgcagccaatgtctggaacagaatctggcaggaatcagtgatattacacaatatatacagaataccctgcaccagaatacttcctacagcttaaagatagacaagcttcccagaggggaggattttgcggaatactttctataccagcagaaaaggggatactgcattcactatgcaactacagctgttctaatgtaccggatgttcggtattcccgcccgctatgctactggttttattgtcccgcagaatgaatttcaggaacaggaagggacgtatagggcagtagtaaaagatgaaaaatcccatgcctgggtggagatttacctggacggcaggggatggatgcctgtggaggtgactccaggatacctgcccggagaggacggacaggaaatcccggaattacaggagaatatctcacaggaggggcaggatgatgccacggatcctcctgaggaggaaacagaggatatccagggggagaaggaaagcctgtctggggaaacagaagataaggaaaaagaaagtggcagcaattcagataagaaggcgggaattggggacaggttctggaataggatcactgggaatatgagcagcagtgcaggaagagcggtgcgctatgggggtactgcagccgcagctgtgattttgttattgttcttggtgatgtttagaaggtggttcttagtgtccaggcgcctcaggctttttggaaaccgtaatccgaatctggcaattgtaaaaatatctcacagcatataccagatcctgacagaagcgggatatgatcagggagacaaaatgtgggatatacagtgggcatcctatgtgcaggagaaccttccctgcctgagaaaggaagagtttctggaatttatgacggctgcgcagcgggcggcattcggaaaggaaaggtgctccagacaggatgtaattgatggaagaaagctttacaggagaattagcaggtatctctataaaagcttgggcggatggaaaaagcttcagtggaaatatataaagtgcagataaattaagtattgcatataagcataaaaggcttcatactattcagtggaatatactagtatgctgacacgttgacatttagtctaacagcacactaggccggaggaggacgaaagagatgttaaattgtctgtatgtaggactgggaggggctcttggggcagtgggaagatatcttatgggacaaatccctctgcccaggatgtcatttccggtaatgacccttgtcattaattttctgggtgcatttctgattggaataatcagcgcagccgcagtcagacacggggcgggaagcacccctttgatcctgtttctgaaagtgggggtatgcggcgggtttactaccttttctacctttgctctggagacaacaaatctgctgggggagggcaaaatgcttgcaggtatgctttatattatcctaagcgtgtgtctgtgcatgggagctgtaatggcagggggcatgctggtaaagtagctcccggttatatttgtattttacaggaattatggtataatttgtacaatcagtcaaatatcctttccgggcaggcaaggtatctgacccttgcggggcggtacgcaagaataaaattatcaggaaatgagggacaatacatatgagcaagggatatgaaattgaaacgaaatgtatacaatcgggctggaaacccaagaaaggggagcccagggttcttcctatctatcagagtactacttttaaatatgataccacagatgagatgggtaaattatttgatcttgaggaggacggatatttttataccaggctgcagaatccaaccaatgatgcagtggctgccaagatagcagatctggagggcggagtagccgctatgctgacctcgtccggacaggcggccaacttctatgcgatatttaatatctgtgaggcaggagaccacatcgtgtgtgccaatgcagtctatggaggtacctttaacctgtttggcgtgacgatgaaaaagcttggcattgcgtgtacttttgtgaatcccgatgacagctacgaagagctctgcaaggccttccggccaaacacaaaagcagtatttgccgagaccattgccaatccggcgctggttgtactggatatagagaagtttgcgaagctggcccatgagcacgaggtgcctctgattgtggacaacacctttgctacccctgtaaactgccgtccttttgagtggggagcagacattgtaacccattcaaccacgaaatatatggatggacatgccatgcaggtagggggagcaattgtagacagcgggaactttgactgggcggcctatggagataagtaccacggtctgacaaaacccgatgaatcctatcatggggtagtctacacagagaggtttggaaaggctgcctatattactaaggctacggcacagcttatgagagatctgggctctattccgtcccctcagaattgttttctgctgaatgtgggactggagacgctgttcctccgtgtggaaaggcactgctacaatgcacagaaggtggctgaattcttaaatgcccatgacaaggtagcccatgtaaactatgcaggactgccgggagataagtattatgaagtggcgaagaaatacatgcccaagggtacctgcggtgtcatatcttttgaattaaagggaggaagagaagaagctgtgaagtttatggacggcctgaagctggcagctattgttactcatgttgcagatgccagaaccagcgttcttcaccctgcaagccacacccaccggcagatgaacgaccagcagctgaaggaagccggagtttccccgggaatgattcgcttatccgttggaattgagaacgtaaatgatattatcgaagatttaaagcaggctttggaacaggcagaataaatagaacagacaaaaaaggaagagcagcggttttctgtgctgctctttctttctataaatgcacaaatatattagttagtagtcgatgtaatatcccgaaactctacggttaccataaaaaggtctgcattgatgtctatacggaagcttccccggcatgcctccacaaagcttttggcaatggagagtcccagtccgcttcccccatccgaacggctctcatccccacggacaaaccgttctgtgtaatcgatccgctccggaagctcataccgggagatattcttcacactcaccgcggccagcgtgccgtctgtttccagagtgataaagattctggagtgttccatggaatactggagggcattctgaagaagattttgaaatacccggtaaagtctctgcccgtctgcttttatcaatacaggttcctccggaatccttgtctttatagataaggtgctgcgctctatactctcagacatatcggcaagggtctgccggataagttttcccagatccagtgtatctatgtttacagggagctgtctggaagcagctttgctgatctcaaatacgtcctgtaccatacttttcagtctctgagatttactttccaggatcttcacataatctttgacatgttccggaagatccggctcctgattcataagatccacataactgataatggaagtaaggggggtcttaatgtcatgggagacgttagagacaagctcaaccttcatacgctcacttttaatctgttcctgaacggcaatgtcaagcccgttgcggatatcattcaggttttttgccgcctctgccagatccggatctttaagcgtgggaacctctgctgcgatgttgccctctttaattctgcaaatctgctgtgtaagcgcttctatatcctcagctgccgcccggtttgtccagatataccaaaactgtgcggccagagtcagccccgctgccgtaagtgctaaaagatataagcaaatgtttgcaccgtagaaagtgccgctatagtacagccgaaatcccaaaagcagaagtaaactcacaaccattccctcacccagaaatgcaggcagataacggaagacaatctttttctgcaccggcatgccggcccctttggagcggaacattcggcagatgtaatcccacaaactccgaagcagactggaagacaaagggtttttgttatagcggatatcgtttcccaaaaagaaaaggatccagacacataccaatataacagaaagataggaaagccaggtccatatagaaccggtaattctgaatacgtaatagtcatattcatagactacatcgtagctgttatgcaggctccagtaaagttctctcagaacttctgtgcaggcaattatcaggagcaggagggagcccagacagagaactgcttttacctcaacccatattttttttgtcttagcagctataagctgattcacactttttatctgttttctccatcggacagcaaggatcagggatgcggcaaacagagcagtcaatacaccaaaaaacagaatcaggctgcgcaggttgtaaagatcctgattcagccgatagagccggttgctcacagactcttctccatagctggaataatccgccttcatataaatcctgggagtctttgcggctgctatggttaccgaagccttttttgatttattatctgtggtaaagttatgatacccaggtactttccagtcgctgttttccctgtagtacccatccccgtagacatcaatagtttttccgtctttttgcagatagacttttgaaccatcaaaatatagtaagaagttatatcccttgggcattttgcctgcagatccgtctaaggtaccttcttctgcattagagtatagagtgtctccgtcataggagatggtatacagcatgtttttatcatccttcagtgcattgtgaagctcccgtctcccctgtgtggtggtaagctcaccggcggtttcctcccacacttctgctgctgtttcctcagatactccagtgtctgaagcatatgcagttcctacggatgcaccggggctgcctccggctgccatcataataaagtcctccaggcgataactgatatactgccgaaatgcctttgtatcctgataatctccctggaatgcgtcagcaggacttatagcaatgctcttcattgcagccaagaggccggatcccatgagaagcacagccagcagcagacataatgccgcaacaaaggacgcatagcttataactaatttacattttttccattttgtatccaattccccacaccacctttaaatattctggctctttcggattcagttcaattttttcccggatacggcggatatgaaccattacagtattctcaggggcaaaggaagcctcctcccatactctctggtagatctcctctgccggaaagattcgtcccggattgcgcatcagcagatcaataattttagtctcagtagcagtcagccttaccggatccccgtctgcatacagaactctttcctctgcgttatacagaaggcgcccattttcatagcgattggaaatctgagtggcatgtacgtctccaagtctggtgtaacgccgcagatgactttttactcttgccgtaagttcctggggattataaggttttgtcacatagtcatctgctcccatggagagtcctagcactttgtctgtctcttcactttttgcactcagtactataatgggcagattacgtctttcccggatcctcaaaatcgctgacaagccgtccagcttaggcatcataacgtctatgagaataatctgtatgggatattgtgcaattttttccagggcttctagaccgtcgtaggccttaattacctgaaagccttctttttccaaaagaatggatatagcctttacaatttctctgtcatcgtcaaccacgagtacgcattccctcatgttctctcctcctttgagcctacgtttagtttatggtataggccttacgaatttatgaataaatttcttacggatttcttacagattctaatcagggtactgttcaggcgccccagttgtgcgaggggggtgcacagtatcctaattataacatagagttcaaacaatagtatcactactataaaaagaatagtgcctgtgctatactgaggcaggcagcaaatttatagcaggaagggagaggcagcactatgatgaagtcgtaccagataaccgaatggtgccatgagataataaaaagccaggtgcaaagagaaggtatttatatagacgccactatgggaaatggctatgatacggcctttttctgtgaactggcaggagaaaaggggaaagtttatgcttttgacattcaggagctggcagccgaaaggacagggaagcttctggaacagcgcgggctgacagccagggcgcagcttatccttgacagccatgcaaatatggagcagtacattgggaaagaaaaggcggactgcatctgttttaactttggatatttaccggggggtaatcacgccatggccacaaaaccggataccagcgtaagagccatacgcacaggactggacatactaaaggagggcggattgatgagcctttgcatatatagcggaggggatacaggctttgaggagagagatgcaatcttagaagaattgaggcggctggacagccggaggtatcttgtgatagtgaatacctattataaccggggcaaccatccgcctattccagtttttatatttaaaaaatagaagcataaaatatatgcccccgcctgtataaccgcgaacttcacatacacaaaactatcatttaagacaaacattctctcatatagtatgtaagaacacatctttggatatgatatgaaagaaaatatcaagcttatcataagtttactgctgatcattctccttctccccttattaattaccgctctcatatcggggagagaagcatgtcctattataaaagaagtggaggtggaagactacctcccggctattgtggctatggaaatcccatggaactattcgaaagaggcgatcaaggcgcaggccatagtatcccggagcaacctctatacacaattagaggagggagctgtttccggagaaataaaacatgcggtggatcagttaaaagaaaataaaatggatgatgattttctggaacgttttcaaaactatcaggaggcggtacaggagacggaaggaaaaatcctctgtaatcaggggaaacttacagatattccctactgcagactgagcgggggaaagaccagggacggaaaagaggttctgggtgatacttatgcgtatgtgccctctgtagataccggcgctgacattgacagtgaagactatttaaaaggtttttactttacctctgaggaaatagaagagaagctgaaaacgaaatacccagggtttgcatggggggattcggaagaggaacccgtaaaaatcataaaaacagacagcacagattatgtcctggagattcaggtgggaaaccaggaattccagggtgaggagctgagagatgccctgggccttacatcctcttgttttaccgtgcaggatctgggggagaagattcgctttctgtgcaagggaatcggccatggaatgggaatgagtcagtataccgcagatcagatgggaaaagagggaaagaattacgaggaaattattacatattttttcccggatttggaaattcaggatgtaaaaacagtaattggtcagaattaagaaaataatgaatactttcacatattctggaaaccctatagttacaacaattgactataagttgaggtgaagaatatgatgaacagtaaaaaaatgattcgtattgttgttagcagtgtactgttggtagctattgttgccacctgtgtgggtgtttataagacagggagtaccaatacgaagaaggaacagagtttagcggaagaaacaaaagacacagacggagaagaactggcggctaatgacagccaggatatgcaggaagaggaaagccaggaatccgggacagagaatgtagaaggaacaaaagaagtagaggaccagccggaccagaatacaccagaagcagaggatgcgcaggcagaacagaatacacaggaaaatccggaagcacaggacaatgcagcaaatgaaagtgcagccacagagaatgtagaggcagaagctccggaaattaatttctctgagtcttctcttatggagtggccgttaaacggggatgtattattggattacagcatggacaaaactgtttatttcccaacattaaacgagtataaatacaatcctgcaattgttatttcctcagatgtaaatgcaccggttttggcagcagccaacggccaggtattgtcaatcacaaccaatgaagagacaggtactacccttaccatggatatgggtaatggttaccaggctgtctatggacagttaaaggaagttccgtatgaagagggggataccgtggcaagcggttccgttatcggatacatcagtgaaccaacgaagtactacagcgtagaaggaagcaatctttactttgagatgtcaaaagacggaacaccaattgatcctgtaatgtatttgccttaggatttgcacaggattggataaatagagtataatatactatgtgagcaatcatataccaatattagcagccggtttttcacagctttactatttgttgtttgttttttgggtagagtacctttttctcctccggttgctttatataaatctgatagattttgcagacagtttgtttgcaaaatcttacatatacatagtacaggagcagtaccatgaattatacttatatacttaggtgtgaagacggaaccctatacacgggttggacaaacaatctggaaaaaagagtggcggatcacaatgcgggaaagggtgccaaatataccaggaccaggcgtccggtagaacttgtttacgtggaagagttccctacaaaagaggaagcaatgagcagggaatacgccataaagcggctgaaacggacggacaagctaaaattgctgcaggcaagaaatacataagaaaacacacttattccataagatatccaacaaagttcataaaagcaatacaaaaaataaaagagcgaaaaatatccaacaaagtggatataaaacatcatttaatcaccctccatacaacttttataatataaatattataaagaaaaaggaggaaattaaatgaagaagagtaaagtcaaacgtatcattgcattgttgctgaccttcgctctggtgctgggcagtataccggcagatatgctgggaactgttctggaagtaaaagcggagcctgaaaagactccgcttttgcattatgacttctcgggaacatcggccgaagacggccagctgatcgaggatgtcacagggaacggcaacgatggtgtcatcaggggaaatcgtgcacagatttctaacggtactctaacccttccgggcggcgataacgggagtgatgccgcatatgtagaactgccggaaggaatgtttgacggaaaggataccctgaccatttctctgtggctgaaaaacgataccggcaagggaaattatgcagctatgtttttcggcagcaaggaacttgtaaatggcatgccccttcactactggatcttaaatccgtgtaatctagagcagggggccttaaagactgcgcttacagacgaggtagcacaggatggaatgccttatctccatgaagctggttttaccacaaacaaagactcaaccggagaaagaatagtaggacccactactgacaacaactggggtctttacaccacggttattactgcagatacacttaccggatactataacggagaaaatataggtacggtaagtttaagaagaagcgccagtgactttggcagcgatctggtatcttacatcggaaaatctctgtatccggacaaactttacaaaggcggagtcagagatgtcaaagtatataccgatgagcttacagacgaagaggtacaggcagagtacgatcagggtatcgtaaacctggatgcctctgagctgaccatgggaggactggacgctgttgtggaggatctggtgcttcaggatgcagggaattatggttcttccatcacatgggagaccagtgatgcatctgtggtagaggcagacggtaccatccacagggctccttccgaggaaggggataaatctgcggtacttactgctaccattgcatatggaactctcggcgcaagtacgacaaaagaatttcctgttaccgtaaaggcacaggctgagcttacaaaagaggaaagccttctccttcactatgaatttgccgacgggacagcgacagacggaagtactgttgcggatacctcaggaaatggaaacgatggtacaattcatggaaaaaatgccggcataaccgatggaacattaactcttcccggcggtgccaatggatcaggagcagcatatgtacagatgccaaccgggatgtttgacgggcggaataccctgacaatctccttctggcttaaaaacgagacaaaaaatggggattacgcagctatgttcttcggaactacagaaaactaccccagacagtactggctgtttaatccatgcaacccgtcaggacttatgaaatcagttgttacaaacggcaacagcagttcaccctggaccacggagtacgggatatcgcccacaaatgcctctcagggaattgcaggacccgctacaggtgaaaactggacctattattccacagttattacaaaggattctatcacaggatattacaatggtgtaaaggtcggcacggtagagactaacaggcctgtttcccaattcggaagcaatctggcaggatacattggaagatcttcctatccggataagtactataagggcggcgttaaggatgttagagtatatacaaaggccttaacagaggatgaaattatagaagactacagtgaaacagcggatgaatcgattatcctggaaatgctcaataaggataaggaagcattaacccttcccacaacggaaatcagaggggatatcagtcttccaaatgctggatctgtgtataagtcttctattacatgggaatctgataaaacagagtatattacgaatgacggaaaggtaaacagaccgtcagaccaggatgttaatgtaacgctgacagctaccctgacattaaaggggcaatccgtaacaaaagagtttccgcttaccgtgaagtacaacaatcctgagggagatctggtggcagcagtaaaagatctctctattggaacgtactacgtgaccaaggatctcactctgcctgccgctgctgccaatggtgccacggttacatggacatcggacagcccagactatatcggagatgacggtaaggttacaagaccggaagacggtgataagaatgttactctgaaggcggaaattaccctgggtgacgtaactgcacataaagattttccggccgtagtccttcagaaaccttacggatacctgctttcttacactggatcgaaggacaaaaaaggattttccgataccagcagtgagaataaagcggcccttgcaaacagcctgcatatgggatacagccaggacggcagtacctacagtgctctgaattacgattccggtatctgctttacggataataaagatgctttgaatggaattttatcaccgtatcttttcagaaaggcagacggaagctatgcatttgcggcgaccaataataataactacagctacatatatgtatttgactcagaagacctgcttctttttaacaacgaatcgaaattagatctgaatacggataagaaggttttggaaccggtatgtgagtgggatggtgagaaatatatcattacctggacagatggagagaaaacctatcagaacacatccgcagatctgaaaacagcctctgctcccgttgaaatacagggaagagataaggagcgtgttgaggctgccataccggacggagcaaatgccggcaacgtgctggaggtaaaccaggaagaatatgatagagtagttaagaaactggcccccgttgtaaacacaggagtcagcagtcttccatcttcagtaaccgttcaggcagaagagggtaaattaccggataccgttcagtctgtggacgcatcctacagtgacgggtccaatgcagagatccctgttacctgggatgattccagtgtaaactataaacaggatggttcctatactgtaactggtaaggtggggtaccctgaatatgacaatccgtttattgagtctaaggcagatccatggattaccaagggagatgacgggtattactattttacggcatcttatccaatgaacggcgggggtgactccaacgggtacagccgtgtgacactgcgaagagctaaaaccatcaaaggcctgcagacagcggaagaagtctctatctggaactggagcgctgcagagggcgtataccgctatatatgggcgccggaaattcaccagataaacggcagatggtatgtattcttcacaggaagcgtagaaaagaataacgcatttggcattcgtccccatatccttgtatgtaaagaaggcggcaatccaatggatcctgcatcctggagtgtgcagagaatggaagcgtccagtggagatgcattgtcatttacaaacttctccttggatatgacacactttgaggcgggcggacagcactatgtaatctgggcacaatccgttggaaattccagtctgctgatcgcaaccatcgacccggatgaaccgtggaagctgacttcggagccgcaggtgcttactgttccggagtacgcctgggagcgtatccgttttaacgtggacgagggtccctctgtattaaaacgggacggaaaagtgtatatgtgcttctcagccgcaggtaccggagcagaatactgcatcggtatgatgacagcagatgaaaatgcagatcttctggatctggataactggacaaagaccccgtatcccgtactgaattcagcagatgtgacaggagaatacggaccaggacacaactcatttactacagatgagtatggcaatgatatctttgtgtaccatgccagatctacaacaaccgtaaacggagatcctctgtatgatcccggccgacatgccagaatcaagacggtacactgggcagcagacggtactccaattctgaaaatgactgcagatcaggctgtggatcctcagtatcaggaagtaaccatgaccgttaaggttgagggaaataaggaagagccggatccggacattattgccaaatacgatttcagcgatggggtgaaggatgtatccggacacggcaataatggtaaggtagtaggaaatgttaccgtccaggatggtgttctcacccttccgggagctactgccagccagaatacaaattatgtggaacttccgggcagtatgtttgcaggccagaataccctgaccgtggacctgtgggtaaagaatgaattagacccgaataattacgcggctatgttcttcggaacaaaggaagaactgccggtcagctactggctgctcaatccgtccaacccggccgggaatatgaaaacggtatttaccaatacggtagatgaagagaaaccttatttgacagaggtgggaatctcaccctcagacagtacaaaagggattgcaggaccatccacaaagtctctgaagggacagtgggtaaaatatactacggtaattacagaagatggaatcactggctatatgaatggagaaaaggtaggaactgtaccgttagaccgaaaagtaagtgattttggttcagatctggcagcatatctgggcaagtcatcctaccccgatcctatttttaagggttcatttaaagatattacgatttacaataaggcactgacagatgaagaaattgagaagagctaccttgaagggctgtccgacgaggaatctgtccgccgtgcagcagaagagtatgtagtagaaggtattgacaatggaattattaccggagatctgggacttcttacaagagatgacaaatataatgtaggaatcaaatgggtcagcggtaatcctatctatgttaccaatgcaggtaaagtagtaggaaatgtaaaagaaaagacgcaaataaaggttacagctacattcagcaagggagaggccagcctggaaaaagtatatgaggcttatctgcttccagcagggacaaccgattattctatggacattgacggaaataatatcggggttgatatcaacgatcggctggtgggattattctttgaagatattaataattccgcagacggcggcctgaatcctgaaatggttaagaataactcctttgagaattaccgctatgacaggggcagcagagtcaatgattacaagaatatgtggaactgcgacgcagaagataagtttgcagttgcctctgagaatcctctgaacgggaataacccgaactatgcggttctcacaggagatttgacacttacaaacaatggctatactcctattaactctctgggaacaccttctatggcggtaaaagaaggggtggatatgaacttctctgtatttacaaaggcggatccatcctacaccggagtaatgaaggtgaagctccagaacgccgcaggcgaggcgctgacagatgaaatcacagttcagcccgctaagacaggcgagtgggcaaaggtaacaggaaaacttaccggaaaagcaacagaaaaaggtcagctggtattcaaagtagagggagcaggagcaggagaactcagtgtggacatgatctccgtcagccctcaggatacgtttggatacggggacaccaattatggacacggcgctggtctgagagctgacctggtgcagaagattgcggacatcaatcctggattcatccgtttcccgggcggctgtatcattgagggcgcttatgagtgggatacttactatgactgggaaaacaccattggacctctggaggaaagaaaacagattcctaacctttggggcaatgatgctacctacggttacatgcagtcctatggattcggataccatgagatcctgtccctctgtgaggagattggcgcagaagcgtatccgatcctcaacgcaggtgtgctctgccaggcaagaagcaataatataccggcagcaaccggagaactgctagatcagtttgtaaaggatgcaacggatctgctggattactgctggggagatccttccacaaatgaaatggcagccaaacgtgcacagaatggacacgaggaaacctttgacctgaaatacgtaggcattggaaatgagaactgggatgacaaatactttaaaaactttgacattatctatgacagagtcatggaatacaaagaggccaattatccggatcgggaactgaccgtaattgcagcttccggtacggccgccgatgacggaaacaatcagaaggcatggaattggctgaagcaaaaccatgcaggcgataacattctggtggatgaacattactatgtaggtactaatttctcacagagacaggacgatcgttatgactacttcttaagagaagaggaaggcggacttcccgtatttctgggtgaatatgctacccatgttggggtacccaacagcatggaatcagcattgtcagatgctgcttatatgaccggtattgagagaaacagcgatattgtaaagaatgtttcctatgcacctctgtttaacaaaatgggcagcaccaactggcagactgaccttatctggtttgatgagtataacagcattggatctattaactactatgtgcagcagatgttctccaagtacacaggggatcagacgataaaggcgcttcttgacagacagggaggacgatatacggtgaatacaggaagcccggtactggctacctacgcaacgaaagggtatgtggaaagcgttaaggttaccagagaagacggaacagtacttttggacgaaacctttgaggatgacagcgaaacactggatctctgggagaaattccctggttcaggcggcagctttgagatcagggacggaaaactgtacctgtctcaggcatctgccaccaatggggtatggattcccagtgtagtaaacgatcctgaatggtataactataaggtagaggccgttgtagtaaaagaatccggcaatgaaggatttatggtaggcgcaggagccaccagcggcagtgactactattggtataacatgggcggatggtcggacagcagaaactgtgttcagaggtcacgtaccaattcagacggcaatgtaatctccaacgatcatgaatggtacaattccagttactattcatctcctggatatacgaaattcccagtaaatgaagcggtaactgtaagctttaactatggaattaacgaacgtctggaagctggctatacctcagcaagtgtgacacgctatgcagaggattacagtatgaacttaaggccataccataacgacatttacaacactgtctccaaagacgatgactatgtatatgtaaaattagtaaacacagagagcggcaataagcagatcaccttaaatctgtctaatctgaatatcaccggcagtgaggcatctgttatatctctgaagggtgacagtctgaatgcagtaaatactatggacaatgaaggaattacacctcagaaatcttcagtttctattgctggaagtaaagtggtttataaggtacctggatattcagtaaatgtaattatgattccgctgagcggtcagggacctgtggatccggtagaaatcaaggtgaatccttctcaggcagaagtggctgagggcggcagtgttgctcttaccgcaaccggaaattatgagggaagtctgacatggagttcctctgatgatgctattgccgttgtcgatcagagcggcaaggtgacaggagtgaaagaaggaaccgtgaccattacagctgctgacagcaaggggaacaagggaaccgcagaggttaccgttacaagagagccggaggagcccgtggaaatcaaactggatcctgctaaggcaattgtacctgccggaagcagtctcacgatcaccgcagccggaaattatgaaggaagcctgacatggagctcttcgaatgaaaaagttgcggctgtggatcaaaatggcaaggtaacaggaatcaaagagggcaaagcaattatcactgcagctgatagcaagggcaatgagggttcagctgaagtaacggttacgaaaaagctgcagcctcattgggtagcagagaacggaaaatggaagtatgacaacggagacggaacctttgctgtgaattgctggaaacagatacgcggccagtggtattattttgacggagacggctacatgaagaccgggtggatctttaccggaggccagtggtattatctgaacagagacggtatcatggaaaccggatgggtatatgtgggaagcacctggtactatctgaaaggtaacggtgcgatggcaacgggctggctgctggacggcagcacttggtattatctgaagagcagcggagcgatggcgacgggctggctgctggacggaaagacctggtattatctgaagagcagcggagcgatggcgacgggctggctgctggacggaaagacctggtattatctgaagagcagcggagcgatggcgacgggctggctgctggacggaaagacctggtattatctgaagggcagcggagcgatggcgacaggctggctgctggacggaaagacctggtattatctgaagggcagcggagcgatggcgacgggctggctgctggacggaaagacctggtattacctgaaagataacggagcaatggcaacgggctggatacaggtaggcaaaaaatggtattacctgagaagcaatggggctatggcctctagtacatggataggaaagtactatgtaaatggttccggagtttggacgaaaacaagataataggtaaattgcagggcagtgccggggggaatcttcctccggcactgcttttatgtttcgctttggtatgggctttttaagaaaaggtaagtatattaaccgtaaggtatcctttctttgacagaccggggatgcaagatttttatgcaaaaatatgataaagtgatagaaatgggagattcattacgaaataacaagtaagagaacgttatcttactatgacaatgccatggcaatatccaaacacgggggcagacactatgaaaatcaatgagaacaattttatttcccggctgaaagccaaagatgaaaaggcgctggtatatgtaattgatgcatacggatgggttataaaaagtgtgatccgaaagcatctgtaccatatgaagccctgccaggaggaatgtatgaatgatgtccttatggcgatatgggataatatccaatattatgacccgggcaaaagcagctttcaaaactggattgcggggatcgcccggtacaaatcagtagattatctccgcaggtatttaaaagatctgaataaccagagctgggaagaaggaatggtgaaagaggaagcaggggagcagatggaacttctggaagaggaactttctgaggagacagaatccatgctgaactgtctaaagcccagagaccgggagttatttcaacggctttttctggaggaacaggatatagatacagtaagcagtgagactggcatgaagaaggaagtcatctataaccgggtatccagaggaaaaaagaagctgcggaagctgtttagtatatcgtgaacggaggagaagagctatggaaaaaaatatttatgctttactaaatgaaatagaaaccaatatggatcattacaaaagagaggatttgtcagagtttgagaagaaaaggctgaaggtatttaccggtaaattaagaaagaaaaaacacagagtcagaagaaccgcggcagcagccgcctgtgcagcagtagtactgggcgctgtgggcattacaatgttcagcgatcaggtatatgcccagattaaggcagtttcctatgacattgcgtcttttttaggaattaaaaaggatttggatccatataaaacagtggttagcaagtctgttaccaaggaaggcttgacagtgacattaaacgaggtgatcctggacaaggatgaactggtaatttcggtcacgcagacctctgaggatggctacccaacagaaaaaagccaggcagaagcttcgctggacgcgtttctttatattaacggcagggaagcgtctggttcagccagcgggggcgcaaggaaaataagcgaggacacaatcgaaagtgtcataaactgtgatgtaaaaaatctgaatatggatgaaaagtacgatatcgaactgaagttttaccggcagggagactttgacactgcctgggagttcgccttttccaccagcggagaagaactggccgcacatacacgggagatacctttggatgattcctttgaactccctgacggctctaccatttccctgaacacttataccagcaacgatatgggccaaaaaatctatttttcctcagaccggaagagaattgagtacgatattatgctgaaaggggaagataacctgggaaatcctgtaaatttctatttatccagattagaaggaaataaaggaaagcttaaaatagacgatttgacaggtgagatttcggaggaagccaccagtctgcagctgacgccgtatgcagttgcctttcctaaggaaagcggtaagatgagcagtgattatgagcaggtgggggatgcggttgaaattcctctgtcataggagtgaagaaaagatagacacaaatacaggcatcacaggcttttaagctctgtggtgcctgtatcttatctagaaaacttagatttactgtaatcatacgggatgctggtcccaacgaccacatcgtcaattttttcaagaatcagccaatcatccatattcccctgatgctcaaaggtaaggggcggtatcttttggactgattcaaattctaccaggcaaaggcattttttctgccagcgggttttctgcttttccgataggtttaacttaccctggtttttttctaatatagcagtaatttcatcttctgtgagctttacatgattttccacattacagacaactgctttggctgagattaaaaggcttcccttttccataaagtagagagtttctcctgggaataccctgctgtggggtatttttctgccagcggcacccctgaccaccatggtttttgttccgtttataattttatccagtaccttctccccctttttccctgtattatcacaatatactaaatgtaccatttttaatcctccttaattataataggtatccatatttgactgagatattcactgctgtaagaatttccgtcactgtaccactccagctccggacatgaggcgtgctgaaaaggatatttcaccagccactctttccgcaaataatcccatccctcctgaattgactgtgggaccggccccctgcagtcaaagactgcccaggacgtttccggtatctgcatttcacaaaatccttccggcaggatatgatctgagattgccatgattgcgtatgaaagctggtctgatgcctcgtcatacttttctgatatgccgaataatcccttgggtttaccagtatctaaagaaattaaccgggaataaatgccgtttttctggcattcattccagaaaccaggtatttctgtctggggagatcctgctatgcatgaaatactggcccgtttcccaataagccggaaagatggcttatgctcaatcctccaggagtacttattccttgtatatacctgcattcgtggcagtacctgcagcttggcagatgcgcctcttgcctctttgggtgaaattccatgaaactgctgaaatgcctttgtaaaagatgttggtgagtcatacccgtatttataactcaaatccactaccctaatagggctgcttttcagatcatatccggcaagtgttagtttgcggtgacgcacgtattcggcataacttatcccgttcatataagagaagaccttcagaaaaaaatggtaagaacagccggatattctcgtgatttcatccatgtctacaggctcctctttccgctgcagatgatcctctgtataatcaataatcctttgaagcttgtcgttccaatccatttgcgatcctcattctttatatgatttactattgtatcatttgcggagggattttacctctctttttgtgtacgagggggatagtaaataaaggaaattgggggaactttcctgggcaataaaaacggcgtgttcctgaaatagaacacgccgcagctaattatacaggcatacccacaacaaagaagtacataacaataaagtggcagacactaccgcccataacaaagagatgaaaaatctcatgtgacccaaaatttttatgcttagaattgaaaatcggcagcttcagggcatagatgatcccgcctacggtatagataatcccgccggccaaaagccagccaaatgcagcgggagacagtgtattcataattgggcggaacgccagaacacaaagccaccccatagcaatgtacagtacggaagaaaaccatttgggacaggtgatccagcaagccttaatcaggataccggcaatggccacagcccatactactgcacagagcattgcaccagtcctgccgtgcagaacaattagacagatgggggtatagctgccggcaatcaggataaagatcatcatatggtccattttccggagccgtctgttaatagtatcagatgcatccactgtgtggtatattgtgcttgcagcgtacagtaaaaccatacttaagataaaaatactcatggcaatcatgtgtatatttcctggttcacgggccgctttcagaagcagaggcagggccgcaagagcagccatgaggcatccgataaaatgggtaatggcacttccaggttcctttggtttaaaattcataataattcctcctttaatactgttgcttaactgctatataattgcactattaatatatggtaaaataagaaaaaccattacatgtagttattaaaactacatgttgatataagtatattacaccttcgtatttaaaaaatcaagggtatatttaaattatttgatagacaaaggataagaaagagggacgtgttccttttaaaaagaacacgtcccaaattaagaacggcttgtcccaaattggatgagacctgtcccttttacttaaaaattaaactcttcttcccatgggaactgttcggattcctccagactttttggccaatgactgcaccattccggtaccctggggttttctatccggtctagactgggagtgtatggctttatgtccaggactggagtattgtggtcggcatcgatgtaagggatatgaatgattccctgctcataattgatatgcgtaacttctacagtggacagggcgatgggattgggacgcacaggggatcttgtggcaaagatacccatggtctccggggcttttttgtagggctgttctgcggtgaggactgatcgggcctcgtgatcatcaaagtggctgaaccaccaaataatgttaatgtggctgaacccgtctaatgcctggagggcagggattacccggggatccagctgaacataagcaccgttttcattgttgcagatggttccgatagaatgtacttgataggttgacataaattatcctccgtttttcctgaatgtttgtttacgatctcacgttagaccctcacaccatgtgagagtcaaggaaaaacgccatgcaataagtaattgcacggcgcggcgttagtttttttctaaaggtatctgtatttctgtcaaataattctggggagaggtctcattccaaggaccgcggtggacgatttggcgggttgggttccccattctgtattcgctgttcttctgcagccaccgggcaaatgacaggtatgctccggcgatgttggaaaatggtccgtaaaccatggtactggccatagcaggtacaggttcggttatgcggtatgcgaactccccgcaactgttaccgagagtttttaccagagcacacagctccacatcaacattttgctctttatacccctcgtcgtaatatatagaaaaggtttcttctgttacaggtactctctgctctaaggcaaacgcagataattcactccacagctctccttcggcataataatctggtatcacccttcgcagggagagaacctgataagcgggaatagatttaacggtaacatggtaatgtatctcactttttccggttaaaagttcttttttggcaagttgaattttcttgagtttttctttttccagaagaatagatcgctcaatttctgaatatttcctgtccagctcttcgatcattgctgcactgtcacagtttttaagcacctttgctatctcagacacctggaaaccgctgtctctcaggtatataattttgttaagaatgggtatttgctctatggaatacagacggtaaccggtctggggatcaatcctggcgggttttaacagccctgcttcatcataatatctcagcatgcggatagttacctgtgtgagttttgaaaattctccgattctgaacataggtgcctccatttatagaaagatactaaggactttcttgtgtataagcccttgcatagtattatatatagttcatactggttcttcaaggtaagaaaagagagggcaccgcattttaaacaatgcgatgctccttgttttactatctactggaaataacagaatctatcagtccatattttaatgcttcttcggcactcataaagtaatccctatcggtatctttttcaatttcttccatggtgcgccctgtattttcggataatattctatttaatttttgtttgcttttttgcatataatcagacattatttttatatcgctggctggtccttggataccgttcccatgcatagccggctggtgtatcatgatttcagcattaggtaacgccatacgcttgccatgtgtacctccggctaataaaaatgctccaaaacttgcagccatgccaatacatatagtagcgacatcacacttgatgtatttcatggtgtcataaattgctaacccggcagttacagaacctcccggactattaatgtatatatgaatatctttgtctggatcttgggcttccaaaaaaagtaattgtgccacaattaaactggcagaggtgtcacttacttcttctcccagaaatataactctgtctgacagcaaacgtgaaaaaatatcatagctgcgttccccccggctcgtttgctcaatgacataaggaattgtactcatgctgcgttctccttgcacatactgataaatagactatattttgttttatagaaattcttacacagggagattctgctttgctttggtacaaacaccccgatattcctataagttttggggggatatacatataattgcttaaaagcaagtgaaaatgcctgttgagattcatatccagcttcataagcaattcttgtgattggatcgttcgtttttatcaatttttccgcagcgattgtaagtctgcggctttgaaggtatttataaatggtaattccagtacattccgaaaataaccggttaagataaaattttgaatatccaacgcttctggcaatcttatctacgttaatttctttctcaatattatcctcaatataattcaagactttttttacaatctcgttttgctgtttcatagttttgcctcctttttattattataacaagcctgagcttgtgtgtcttaataaaaagtgctgtattgcttctaacttattttcaaatagagttatgtagtgtgatttttataagacatacaggatcgcctatctttatgcttgcagtgcttgtcattagttccttaacaagcgcaagcttttcatcaattccgtaaccacattggcagttcattcgtattttcttaatgccctcaatttcaaatttagtttccaggcgccgcatgacagcctccttcctattgaagcatttttaaatacttcttaatttatagaaagaaagccttgtattcatctaaaaacttataccagtttttctctaggtccacatagttaccaataaatcgttcctataacacggacatatcgtccggttttttgtcttcaatttgccctgcatattccgctgctgttttgaagttaacaatccgctctggagtacgaagctataattggacggactatatccacaatccggatctatgtctttgattgcttatgtggggtttagcttcatgtaaattgcactttgatcgactttacaaatagacactcccgctggtttcttctttaaatatccggatgaattggtattttgatataaaaaaatgagcggctacggtattaagggaccaattttcattcagatgcagcataatataatcaatgctttgattaacaagttttttcttatccatataccgttcttcaatgcctttattgctcttctttttacaagtattcaccgtcaagtatagcatcttgtaatttcagcttcaaggatggcttcttaacggcaaaacgccgccccgtttttacagggcggcgttttgcgtaaagtgataggattatatattttaatagttctcagcttttctttcaaagtaagctctcggatgagcacataccggacaaacctcaggagcctcgtcagcttcgtgtacataaccgcagtttctgcatttccatcctaaaggagcatcccctttaaaggtttcttctgctttcatatgctccagtaactttaagtagcgtttttcgtgagctgcctctactctggcaacaccctcgaatttctgagccagttcctcaaagccctcttccctggcttccctggccatgcgtgcatacatgtcagtccactcataattctcaccgctggctgcgtcttccagattagccaccggatccagaattccgtggaactccttaaaccacattttagcatgttccttttcctggtctgctgtttccagatataaagcagctaattgttcgtaaccagctttctttgcggcggaagcgtagtatgtatatttatttcttgcctgtgattcacctgcaaaagcgtccatcaagttctgttcggttttagttcctgcgtatttagacattgtaaaatcctcctttggtttggttaatgactacacctttatatcatatatgcgggcttcgattccgtcaacctctgcccgcatatactgtatgaatatgaaatttatgagacaaattagttagaatagttaatgaattaaccgaagtatctctttaacaggccttcgaaagctttgccgtggcgtgcctcgtctctggccatctcatgaacagtatcatggatagcgtccaggttagctgcttttgcacgcttagccaggtcaaacttaccggcagtagcgccgttttcagcctctactctcatttcaaggtttttcttggtactgtctgttacaacttctccaagtaactcagcaaatttagctgcgtgctctgcttcttcataagcagctttttcccagtataaacctatttcaggatatccttctctatgggcaactcttgccatggcaaggtacataccaacttctgaacattcaccttcaaagtttgctctcaggtcggcaaggatgtcttcgctaacgccctttgctacgcctacaacgtgctcagcagcccaagtcttttctccgccctgctcgatgaatttttcagcgggaactccacataccggacatttttcaggtgctgcatctccctcgtgaacataaccacatacactacatacgaattttttcattgtgaattctccttttctttgtttaaaaattgttttttgggttttaaatgcttaactcatagtttttggagggactatgatgttgcgtgctaataatagtaattgttactgatattaacttaacatattgggttaaaattgtcaagtatattttggaaaaattttctatatttacaggttctttatgcattcttcacaaatgccgtaaaaatttgtaatatgaccgtcgatctttccgttaaaatttttactggccacatcttttatataaccgatgtcttccatgtccaggtcgatgacactgtggcagctgcggcagataaagtgataatgtggtgctacattgccgtcaaaacggtcagggccgtcgccggtagagatcttgttaatttcaccgatactggccaaaagggaaagattgcggtatacagtacccaggctgatattcggataaatagtacgtatactgtcgtagatagtatcagcagtgggatgatcatatcgattttgcagaaactctttaatagattcccgctgtcgactgtattttaatgccgccatatttcctcctttcaataatagtaattgttactgatattactatactatacttgattaaaaaagtcaagtataaaataaaaaaatgaaagggtaaaaagggacaggccggtcttattttgggacgtgttctttttagaaagaacacgtcccccattaaagtttagccgaagtatctctttaacaggccttcgaaagctttgccgtggcgtgcctcgtctctggccatctcatgaacggtatcatggatagcgtccaggttagctgcttttgcacgcttagccaggtcaaacttaccggcagtagcgccgttttcagcttctactctcatttcaaggtttttcttggtgctgtctgttacaacttccccgagtaactcagcaaatttagctgcgtgctctgcttcttcataagcagccttttcccagtataaaccaatttcaggatatccttctctatgagcaactcttgccattgcaaggtacataccgacttctgaacattcaccttcaaagtttgctctcaggtcagcaaggatgtcttcgctaacgccctttgccacgcctacaacgtgctctgcagcccaagttttttctccgccctgctcgatgaatttctcagcgggaactccgcaaaccggacatttttcaggtgctgcatctccctcgtgaacataaccacatacactgcatacgaattttttcattatgatctctccttttttgtttgaaatttaatggtaaagttgcttgttactttatgtaacatgtatgatttattaataatagtaattgttactgatatcaatataacccattagattaaaaaagtcaagtataaaatacaaaaattagaaaaatgtggatcagatatttaaaaaaggatatgcgtcagactgcatggcagggataacgcgccccaacctctgaaaaacgaggtaacttttgggagcaatgtttacgttgtagcagatactggttaaagggcaatataactgggtgataattctctgaatactgaggtttgagagcttagcaggtggtcatgcattttttgtgcggctgcctcccagtctttttttaaacagggaataagaatctccaagtgttcttttttggaatctttcagccgtatatctgtaatctgtgccgctaaaatacgtgccctgtgagtctggagatggatttgttcatacatatgaatgaaatacgggttttcagttgcctgaatgatcgacatatgataactgtcatctatagaatagtgggcggcggctggcccatgatctgtaatatgagaaaacttctcataatattccatataaaaagactcaggcagggtattcccataatgtaaaacggcataaggctccaactgcaggcgtgtctcgtatacagcctgcaaatctcttacggagaggcctgccactaatatgccttttttgggaagtatggtcactaacttctcttgttctaaacgccccaaagcatctctaataggcgtgcggctgccggggacggcgttcagaagcatattttcattcaaaagtataccggggggatattcgcagttcattattttttcgcgaatcatctggtacgcttgttgttttaaattatttttgctcattgcggttcctttcaaagatattcggacctgataaataagatgaaaatgtaaaatctctataagtatccaatatatgttccaatgaactttctccctgtttccagttttcttctaaacataaagttagtagctccatatagagttctctcagctgacagatacactcagggtccagagggattaatttccgtatccggaattcctgggcattcagttgatcgtatgtttgtataaagtatgggtttgcggattcttctataaagatattgtgcagggaagaagcaatgcgataaaaatcttcaggagtaggaaaacaaactgtttcattgaagaacttaaaaaatatttccagctcgtgtttatcaatatttcttccgtattcttttattgtatacaactctagaaagtaacgggtctcaaagtatgcattcaaatctttcaaagtaatctctttaatgatgaaacccttgggaggtgtgatttgtaccaggctttcgtgttccagacgactgatggcgtcccgtaccggtgtgcggctgatagacaaaagctgacacagagaattttcattcatcaaagtccccggcgggaattcacagttcaggattttttgctttattatctggtaagcttgtgttttcaaactttctttactcatacgtaaggctctcctttgaaaaatatcatagcatatcttacgggacggtgcaatgaaaaagcccatattcaatattataatatataatgatgtatacaatgaaataaaaagagaggattcaacaggatgagttaggataaaaagtgcacaaaaatgaacccattaattagtgaaataacaataaaaataataaaaaatgttgacagtatctacaagattgtatagtataataaatatataacgttgtatacattaatgaatacaaagaatggcagaagggaggagaaatcaggaaaacataaggaaatgcagacaaaatcagatgtttgacaagaagaaaataagaaaggcgaatgaagatgagggttatatctcaattatgcaatagtgtagagcttcctaagatgattaagattaagcagacattcgagagagaggagattgctccggacgcaataccggatgttgttagaaatgaacttaataaaaacagagatcagttcagaccgggaatgagtattgccgtgacctgcggcagcaggggcattgcaaacatcagcatcattataaaagcggttattgattgcctgaagaaatatcagacaaggccctttgtcacagccgctatgggcagtcacgggggagctacggacgagggacagaggagagtacttgcagatttcggtataacggaagagtatctggactgtccggtacgatcttccatggagactgtatacgtgggcaatacggaggagggggaaccggtttatattgacaagtatgccgcggaagcagacggaatacttgtatgcggaagaatcaaagcacatacatcgtttcggggagaatatgaaagcggcctgatgaagatgatgactgtaggtctgggaaaacagcagggcgcagatgcctttcattctatgggaatagagcatatggcagaaaggcttccccaatttggaaatgccattttgaaaaactgcagcatagtttatggcttggggattatagaaaatgcttacgaaaaaacgtaccggttaatagggatgcttccggaggagatacctgtgagggaaccggagcttctaatggaagcgaaaaagatgatgggaaaactgtattttgatcatgcggatgttattgtagtggacgagatgggaaaaaatatcagcggtgacggtatggatccgaatatcacaggcaagtatccctctccgtatctgacaggaagcatcagtacacagcatcttgtagttttagatctgacagaggagagccatgggaatgccaatgggctgggatgtgcaaatgtgaccacgaggcggctgtacggtaagcttgacatggatgccacttatcccaatgcaataacttcaacggctctgtgggcagtaaagataccaattgttgcagcttctgataaggaggcaatacagattgcagtaaaggcctgtacaggcgccggccgaaaaaatcctcgtattatcaggataaaaaatacattagatatcggggaaatatatatatcggaagcgctgctggaggaagcaaagaggcatcccaagattgaaattataagtgaattacaaaagtgggattttaatgaacagggaaatttattctaaggaggaaagttatgtcgtcgacgctgttagtaattaaccttattataacaatagcaattattctgattttgatcctggctttaaaacagagtccggtgattgccctgattatgggctccctttatatggggattgcatcgggggtaggtgcggtgacaaccattgaaacgatagctacaggctttggcaattctatgaccagtatcggtatcagcataggacttggagtgatccttggaaaaatcgtggcggacagcggtgcagtgcagtccattgccaatggaatcacaaaattatgcggaaagaaaaaagcggacattggtttgggccttacaggattcctggtatcaattccagtattttttgatgtagcgtttgttatcttaatgccccttgccaggttcatgtcaaaacacggtaaaaaaataccatattatgcaggtgccctggtgggaggccttgtaattgcccatacctttattcctcccacgcccggtcccttggccggaagcgagatgctgggccttgaggtgggaactactattatgtggggtattattatcgggctgcccagttttgcgattgccctttttatttacaacaaactattcttatcccgtccgggtttctgggatccggagagagatgaagagatcgatttagaggaggaaaagaaagaagaggaaaaagcgcagaagcttgtggaagcaaagaaccttccctctttcaagcttgccgtccttccaatcctgctccctattgttttcatcttaagcggaacaatatcaaatgctattgtaggggaggatcgcgtaccggagattataaaatttctttcaaataaaaacatagctatgttagtgggtgtatttggagcttatctggtcactattggccgtctgcctataaaagaggttaataaaacagtaaaccatgcactctcagatgcgggttctgtattgctgatcacaggtatgggcggggcgctgggcgctgtattggcggcagcgggaattggtgatgtactggtgggagttattgaaaccatacatatccatcccgtactgtttgcatggctggtagcagtcgtacttaaggctgcccagggctcaggcaccttatccatgattacagctatatcgctgctggcgcccacagtcggggaacttaacgtacagccaatctttattgcgcttgcagctttctccggctccatgtgtatatccattgttaatgacagcggattctggattactacaaaaatagccagattatccacacttggagggtttaaaacctgttctttaatgtgttttattatatccattatcagcttaattttaattatgggagccagctttattttttaataaaactggaacctcccatgcataaattctaactatacggaggttattatgaattctagagataaacttacagcggctgttaaccataaggactgcggaaggatagcatttgatctgggcgggacaaaggccacggggatcagtgcttccctcctttaccgcctcagaaagttaaatggaagagatgagccagtaaagatttatgacacctatcagatgcttggtctcatagacgccaaagatgcagagatgtttgggatcgatgtactgcctttgtggagcgacatgactgtattcggctaccgcaacgacaaatggaaggcctggacaacccctgatgggacgcctgcgcttattggtgaggggtgtgctatgtcttgcagcaacggacgcttgtatatacatccccagggggatctcagagttcctcccagcggctgtatgccagaaggaggacactattttgactatataacaagacagggagagttcgacgaggatgagctgaatggtctggaagattatagagaacagcttgaggtaatgaccattgatgatgctactttggagttttacagagagcaggcggaggattactttaataatactgactgcggaattgttctgaatgcagaatacggcaatctgggggcgcagactatgctgaacggaggctatgtaaagagtacgccgggaatcagagatttcagcgaatttctggtggcacacagtctgtaccctgagtatatagaagaaattttcgaggcctggactcagctttgtattcgcaatcttaagcttttgtatcaggcagtgggtgagaaggcccaggcagtgtttttgtgcgggacagattttggaacacagcacggtgagattatgtcggagaaaatgtttaaagatttatatgtaccatattttaagagaattaacgggtgggtacatgagaatacaggatggaagaccgtctaccacagctgcggttcactggtaaatatactggatgatatggtcgagtgcggcattgactgtctgaatcctatacagacatcggcggatcacatggatcctcaggtcctcaaggagaaatataacagggagcttaccttctggggagggggagttgacggacagaccacacttgcacatggaaccccggatgatgtagagagggaaatgagagaaagaatccgtattctggggaaggacggcggatttgtgttctcagcagttcataatctccagagcaatgtggatattgccaatgtccagagaatattcgatgtgttaaaggagtacagataatatgaaaacaatcgtcataaaccgcccaggtgaggtggtaattacagaaactgagagaccaaggccgcaaaaaggcgaagcactgctgaaagtgctgtatggaggtatctgcggaagtgatctggggacctacaggggcacatttgcctatgtttcctatccgagaataccgggacatgagttctccgcggagattgttgagattgaggaaaatgacaaaggccttaagccaggtatgaccgtaacctgtaacccttattttaactgttcggactgttacccgtgtcaaaaggggagggtaaactgctgtaccaccaacgaaacaatgggggttcagcgtgaaggtgcatttgcagagtatattacaatgccgattgacaggatatatgacggacagggactttctcccaagacacttgccctaatagagcctttctgcatcagctatcatggggtttccagagcagatataaaaccgggtgaccgggtattggttattggggcgggtaccataggtgtattggcatcaattgcagccaagagcaaaggagcaaaggtctatattgcggatgtagcccggcagaaggtagactacgcagtaaatgagtttcagctggaaggaggcatttggaatgacaaaccggatacctttctggataaagtaaacagtataacagaggggtgcggttttgatgtggcaatcgaggctgtgggactgccttccaccttccagaactgtattgacgctgcagcatttggagggacggtagttctaattggtgtaggcaagaagaacctggactttaattttactatgattcagaaaaaagagctgaagatcttgggctcaagaaatgcgttaaaaaaggattttttggagctgattgggttgataaaatcgggtgctgttgatctggacaagattgttacaaatacatatcctggggcagaggctgaaaaagcatttcaggaatttgataaaaatggtgcttccatgctgaaagtgctattaaaattctagaactttttctgtaaaaccagaagaaaagtgagagtggactatgcagaaattcattaaaataaacccaaaagacagtgtcgcagttgctctggaactgttaccggaaggcagcaatgtaaagtgggacggtgaggcgattacagttgcggaagatatcccgcaggggcataaatttgctttatgccctataaaagagggggagagggttataaaatacggaaaccctattgggattgcggccaaagacatccgcccgggagagtaggtgcatactcacaatatccggacgtctctgggtgaggtgcttgattacacatataaaaaagacggcccggcacgtaataaggctggtgtatcatacgaaaaccgacaggcgggaatgagcggggacccagaggcatattttcagggatttgtacgggaagacggaaaaaccggcgtgagaaatgaagtatggattatccctactgttggctgtgtaaacagtgccgcagaaaagattgcccgtttggcagggaaatatataaaaggaacggtagatgatgtgacagcatttcctcacccatacggatgctctcagatgggggaagatcaggagaataccagaagaatcctgtctgatctggtgcagcaccccaatgccggcggtgtgctggtgctgggacttggctgtgagaacagcggtattgaggaattgaagcaatacatcggtccatacaataagcaaagagtaaggtttcttgtagcccaggactgccgggatgagatagctgaaggtacagaaattgtccgggaattaattgattatgcgtctggatttacccgggaacctgtaaatgtccgggaactaattataggtatgaaatgcgggggttctgacggcctgtcggggattaccgccaatccggcggtgggtgctttctccgaccttttgatctccggagggggaactaccattcttacggaggtacctgagatgtttggggctgagacgctcctcatggaacgatgtgaaaacagagaagtctttgaaaagaccgtagtgcttattaatgattttaagaactactttactgaacatcatcagactatatatgagaatccctccccgggaaataaaaaaggggggatctccacgctggaggataaatcactgggctgtacccagaaatcaggtactgcactcgtaaaggatgtcttaaagtatggtcagcaagtggagaaaaggggtcttaatcttctgagcgcaccaggaaatgatatggtggcagccactgcccttgcagcaagcggcgcccatatcgttctctttaccaccgggaggggaacgccttttgcatctccggttcccacgcttaagatttcctccaacagcagactgatggaagaaaagagtaactggattgattttaactgcggcagccttgtggagggacagagcatggaagaactgtcccggaagctctttgactttgtgctttccgtggcctcaggagaaaaggtaaagtctgagctggaagggtatcatgatatggcgatttttaaacagggagttaccctatagtatagggaagaaatatggaggtaaaaatgaaaacactcagttataaaaccctggaggaacagggttataagggatatttgctgaaagaagccccggaacgtatgcttcagtttggagaaggtaactttttaagagcatttgtagactattttgtggatgttatgaatgaacgtgcaggattcaatacaaaagtggttttatgtcaaccaatagctcagggcctggcagaccaaatcaatgaacaggagggcctttacactctttacctgcggggctttgaaaatggtcagaaggtcaatgaaaagagagtaatctcctgtgtcagccgatgtctgaatccataccgggactacagtgctcttgcagactgtgccgggaacccggagcttcgatttattgcctgcaatacaactgaggcaggtattgtctatgaccctgcctgcagctttgaggataagcctgcagccagctatccaggcaaactgacacaatttttatataaaagatatctaaaatacgggcaggaaaaaggcaggggatttatcattctatcctgtgagctgatagacgacaacggaaaagaactaaagcggtgtgtcaaaaagtatgcggcacagtggaaactgggacaggattttgaagactggattgagagagagaacatattctgctccacattggtagaccgtattgtaactggttaccctagaggagaggctttagaactgaataagttaaatgaatatgaggatagccttttggataccggggaaatctttggtgtctgggtaattgaagggccggagtgtgtgaaaaaggagattccctttgaacaagcagggctccccatcctggttacagagaatcataagccatataaacagagaaaggtcagaatccttaacggagcgcacacgagtatggtgctgggggcatatctggcgggccgggacattgtgcgtgactgcatgcatgatgaagtgatccgaaggtttatgaaccacatcatctaccatgaaattattcctacactaaccctgccaaaagcagagctggaggaatttgctgcttcagtgacagagcgttttcaaaatccctttattgaccattctcttttagcgatagccctgaattctacctcaaaatggaaggcaagagtcatgcccagtctgaagggctatgtagaaaagtttcataaaatacctgagggacttgctgcgtccctggcgttttatattgctttttacaggggcaaaagattagacgactctggtttatacgctgagagaaacggagaggagtacttgattcaggatgacagaacggttcttgaattcttctggaggcatcagggggattctgcggagcaattgacagcagctgtgctgaaaaacgaagaactgtggggtgaggatcttactcaaatccagggattagaggagatggtaaccagtagtgtgagagtgatagaagagtttggggcttatgagcttatgaggcggtgttaacttgggatttaggggtgtagcgcttggacttcagcttaaagtgattcaagtcggaaagtgtgaggtggcggggggacggtgagaggaatcccgcggcagcgggctggctggttcggacgggagggaggcttaagttccggggacacctccgtcgcgaagagagtctaagccaaaaccggaatccccgccggagcaccgttcgtatgtgcaaagaatgcttgatgtgcattctctgcccatgctcactttttttcggccctgactgccgaaaaaatctccagcgtgaatcccggttttgcctaagactctctactcactcctccggaatcgtccccggaacttaagccttcctcccgcccaacccagccagcccgctgccgcagaattcctctcacctgggtatggagaagttccagggggttggctatttatccaaaacatcaagcggacaatagtgcgaaacaggatgaagagtgtacaactctcgaccttccccgcccgttttccgtgaatgtgaagtgagtctctgccaggtcaagggaggaggtcttggggccaggggtactgggtggatctgcgcagactgcggagtgcgtccgaagatccactgccggcggtcacttaggagcgaaggctttcctgagcttcttagtgaacggccaggcagttagctgaggagaaacgcagcagcaagcagatccacccagtacccctggccccaagacctcctcccttgaccgtccgtctgcgacactccgctcgccgactatttcacctcgagcttcatatacacaaaactataatttaacagatctccgcccccgccggcatttctttctccggaaccatcagggccagttcaccattttcattttctgcacagagtatcataccttcggacacaacgcctgccagtttggccggtttgaggtttaccagtaccataacctttttcccaaccatttcttctgctgtataatgtgccttgattccagatacgatctgccttacctggctgccgacttttacctgggagcatagcagctttttggatttttttacttcctcgcaggataggatctctcctacctggaactgcattttcatgaagtcgtcaaaggtaatctcctcttttgcctctatatcaattccattggattccggagcggaagactcttcctgaggagcctcggcggccttcttttcttctactttcgccaatacttcctttacatccaggcgggcaaacaggatctccggtttttctgttactttactgccggagggatataatccaaaggaggacagctgttcataggatcttttctctgcatgcagctggcacaggattttctgggtggtctcaggcataaaggactccagaaggccggcaccgatacagattccctctaccaggttgtagagaacagtggagagtcgttctttttttgactcatctttggcaagagcccagggcattgtctcatcaatatatttgttgcagcgcttgaagactgcaaatatctcagtgattgcgtcggcaactctaagatcttccattttagcggccaccttttctctggctgcggtgactacggacttcagatctccatccacttcttcctcaacgcctgtgttggcaactacgccgccgaaatacttgttggacatggaaatggtacggttcaccaggttgcccagggtgttggccagctctgagttcattctctcaaccatcagttcccaggttatgacaccgtcattttcaaaaggcatctcgtgaagtacgaagtagcgcaccgcgtcaaccccgaagaaatctaccaattcgtccgcatacaaaacatttcctttggatttactcatttttccttcgccctggagcagccacgggtggccgaatacctgtctgggaagtggcagatccagtgccattaaaaagattggccagtaaatggtatggaagcggatgatatccttgccgatcagatggagatctgcaggccagtttttcttaaacaggtcagagctttcgccgtcacattcgtatccgatgccggtaatatagtttgtgagggcatccagccatacatagactacgtgcttaggatcaaaatccactgggattccccatttgaatgaggttcttgagacacagagatcctgcaggcccgggagcaggaagttgttcatcatttcatttttcctggacaccggctgtataaattccgggtgtgcgttgatgtgctcaattaaacggtctgcgtatttactcattttaaagaaatatgcttcttccttggcaggggtcacttcccggccacagtcagggcatttgccgtccttcagctgggactctgtaaagaaggactcacagggggtacagtacattccttcatagtatcctttgtagatatcccccttgtcatataacttcttaaagattttctggacctgtttttcgtgatctgcatctgtggtgcggataaatttatcgtaagaggtattcatcagatcccagatgtttttgatttctccggctacgctgtctacgaattctttgcaggttacgccggcctctgcagcctttaattcgattttttggccgtgttcgtcagttcctgtctgaaaaaatacgtcgtaaccctgttgtcttttaaatctggcaatactgtctgcaagaacggcctcgtaggtattgccgatatgaggctttcctgaagtataggcgattgccgttgtcatatagaatttctttttgtccatgttcatttcctcctggctgggatggaactctcccttgtttgcttgtttagtaaagcacgatatagagcagtaaaacaaaaaaaccgccctccggatgcagctgcattccagaagacgggactgtcccgtgttaccacttctatttattcatatctcgcgatatgaacctcatggagtacctataccggtgcggtgttgtctgtcccgggtctatactctttcgctataacaggcgaatcctgttgcagccttgcggcggatataccgttcggtgcacctctcagaagccatgttcagtgatctcttacatatccctctcagcgttgtatgcatctatggaaagataacagacatgcgggaattctctgtaatgcagggggacaacttactctcttcgtcatcgtgttttcctattaaaagttatgttagcatggttcttctgatttgtaaagggggataaaattattccttaagatccagacggcggctccagcgaaggaaggtatcctgggatacctgcagacggcgggctccctcccgggagctgataaacccctgtgtccagaggctttttacttcatgaaagttatctgggataggcttggaggggcggccgaatttgacacccctgtatttggcggcggcaattccctccatctggcgtctgcggatgctctccctctctgtctgtgccacatagcttaaaatctgcaggaccaggtctgcgataaaggttcccgtcaaatcatttccctttgcacgggtatccagaaggggcatatccagaaccacaatatctgccgctatcacctttgtaagaatacgccattgttctaatatctcgttataattgcgtcccagccggtcaatgctttttacaaccaccagatcttttttcttaagagtttttatcattttttgataggccggccgctgaaagtctttgccgcttagtttatctataaacatattctgatcctgaacgggaaattccctcagagccaaaacctgacggtctacattttgatccttgcttgaaaccctgatataaccgtatacctccactgaaaaacctcctattttgattttactgatatctcgagcaactgtttctgtaacacgtgcgaaatccggatgcaagtcaaaaaaatgccatctcagatgtaaaccggaggatggcaatctcagaaaaactttttccagacatataaatgcccaggcgaaagaaatggtagaatttttcgttcaattgtgctatagtaaatacacattaaatccattgtaaaaactggtaaatattgcggatttactgtcatattctataaaactgtgctgcaacaactgccgcaggaaaagaacggtaaattctactttttcattcaattgtttctataatattattttaaccaagtataaaaataatatcagcaaaagaaagttaaaacacaggagtaagaaatataatctgaaaaggaagggatatttatgcatgttagtaaaaaactaattgatttgaattattgccgcagctgtctgaatgagacatatcaaatgaatctaagaagaaaggatgtggttattctgcagtaccctcaggtctgcagctgctgcgggcaggtgaagaatattgtgtgtggttccagaggtacttcgagattcctattgtacctgaaggtcagatagttagattctatcccaaaatactttacatgtacataaaaatggtaccagctgctgaacacacatctggtaccaccttagaacttaaagaactttttcccatacttccctgccagcaggggtattggctatgcctcccttgccggtttccttcagagactcatccatcttttcccccacctctctcatggcatcgatcacctgatccggggggattctgctttcgattcccgccagcgccatgtcagcacaggaaagtccgtttacagccccaatgacatttcttttgacgcagggtacttctaccagaccagctaccgggtcgcagaccaatcccaaaagatttttcagtgccattgccgctccgtgtacgatctgcccattggatccgcctttgaggtataccagagcgccggctgccatggccgaggctgacccgatctctgcctggcatcctccggacgctccggctataaatgctctggcggcaattacctgtccgatgcctgcggccacatagagggcttctatcattctatcctccggtgcctttccctcctgatagaggggaaccaacacggcaggcaggacgccgcaggctcccgctgtgggtgcagctacaattcgtttcatgcaggcattggactcacccatttcaagtgcctggacgataacccgggacataaaatctccgcacagagtctgcccggactgtcggtacgcctccatctttccgcccattccgcctaccagaccgctgcgggacatcagctctttttggtatccttcgctggctctcagcattgcgtgccacatttctctcattttgtcataagattcttccacaggtatggttctttcatttatatcgtcctggagaatggcttcccagaagggtatgtccttttcttcgcagagctttataatgtcttccagtgattggtatgccatactatttattcctccccgttaatataagtcacttttataacaccctccagatgctccagccatttgactgcatccgcagggaccggttgatctgtctccaccaccataaccgcatatccgcctctcttatcccggtaaagctgcatagtagcaatgttcaccgacttgtgggcaagtgtggatgtgacttctgccacgtggccgggctgatccaggttgtgtacgatgagtgtaggacattcaccggtgcagtttacggtgatgccgtccagcttgttaatcatgattctgccgcccccaagtgaagaggcctgaacctccagcaggtttttattttctccctctacattaagaagggcggtattgggatgtgctccgggaatgtgggcagtcccgatggaaaagctaagacctgcctcctctgcaatggaaaaactgtccggtatcctggtatcatccggcttcatacccagcagtcctgctacaatcgcccggtcagtaccgtggccctttccggtatcgccaaaagaaccgtgcaggccgatttcggccttaataggacggctgcccaataacgtttttgtgagtaaaccgattctaactgcgcctgcggtatgagaactggatgggcccaccatgacaggccctaaaatatcaaatatattcatataattatcattctccttatgtgcccgattattcttataaataacaaaaaatccaaagaaattcaatgatgccctccggtcattccttctttggatgagatcactatactacaaaaaccgatgattagcaacagaaaactctttattcatgagggaacgggaaaagaaatcggatcgattccgaggcgttatattttgtgaatgcctgccgccggttttaaccagtggattaaattttagtttcaaactgaccgatgtgtttgaaaatactttcattatttgtgcactttaacggatatattttagggtatactgactctatattatgcatttttctgtattagatgaaagtattttccataaactaaaatctattgaaatgattttcacaaagaattataatgggcttacaaacagagaacgagattaataacgaagggagtttgatgataccatgaattcaagcattgaatcgctgcagggacatttgattgtatcctgccaggcattgccccatgaaccgctgcattcctcatttatcatgggacgtatggcacttgccgcaaaagaagggggcgcctttgggatccgcgcgaacaccagggaagatatcgctgaaattcagaaaaatgtggatcttccgattatcggcattgtgaagagggattatgaggacagcgctgtttatatcacacccactatgaaagaggtggatgagctcatggaggtaaaacctgaggttatcgccctggatgcaaccggaagcctccggcccggccaggtgacgcttgatgacttctatcatgagattcggagaaaatacccggaccagcttctgatggctgactgctcaaccgttgaagaggcactccacgcagatcagcttggattcgattttataggaacaactctcgtggggtatacgccccagagccagggcaacaaaatagaagcggatgactttgagataatccgcaccattctctcaaaggtgacacataaagttatcgcggaagggaatattaatacaccggaaaaagtaagaagagtcatagacctgggctgctacagcgttgttgtgggttctatcattacacggccgcagcttatcaccaaatcctttgcagaagcactggataagtaaaagtcggactttcagcaacgggacatacgtcacccttaactattatatatatgagaagaaaaaggagaacgattatgatgaaaaacgcagacatgaaaggtatctatagcgcattgcttgtttcttttgacgagaacggcaaagtaaacgaaaagggactcagagaaatcatccggcataatattgataaaatgaaagtggacggcctttatgtgggagggagcaccggtgaaaattttatgctctccacagaagaaaagagagagatcttccgcattgcaaaggatgaagcaaaggacagtatcaagctgattgcccaggtaggctccattaacgtgtatgaatctgttgagctggccaaatacgccacagagctgggttatgatgccatttccgcggtaactcccttctattataagtttaccttccaagagattaaagattactataacacaattattaacagtgtggagaaccgcctgattatttactctataccggcgcttaccggggttaatatgagtgtagcacagtttggagaattatttgaaaacgaaaaaattatcggagttaagtttacagctgcagacttcttcctgcttgagaggctcagaaaggcatatcctgaccacttaatctatgcaggctttgatgagatgatgcttcctgcggcagtctgcggaatcgacggcgccatcggatctacctttaacgtaaacggtatccgcgccagacagatttatgaactggcccaggcaggaaagatagaagatgccttgaagatccagcacgtaacgaacgacctgatttctgcaattctggcaaatggtctgtatcctaccattaaggaactgttaaagcttcagggagtagacgcaggatactgccacagacccatggcaagcgccgatgagggacagaaggctgttgccaaagaaatctttgataattatcttggataattccgataggaggtaccgtaatgcagggttttaccgttattgatttgattattcttgttgtatacctggctgccgtattattcgcaggcctgcatttctctaagaaagaaatgaaagggaaagaatttttccacggggatggaaccatcccctggtgggtaaccagtgtatcaatttttgctacattgctgagtccgatttctttcctgtcactggcaggaaactcctatgcagggtcctggattctctggtttgcacagctgggtatgcttgtggctattcccataactataaagtttttcttacctatatacagtaaactgaacattgatactgcctaccactatctggagcttcgtttcgggagcaagagcctgcgtattcttggggctgtcatgtttatcgtataccagattggacgtatgtccatcatcatgtaccttccttccatggtacttgcaaaccttacaggaatcaatgtaaatatcctgatcattgtgatgggtgtgattgctattatttactcatacacaggcggcctgaagtccgtgctttggaccgattttattcaggggagcgtacttctggttggtgtaaccttcgccctggtcttcctggtatgcaaaatcaacggagggtttggagcaatctttgatgccttcggtcaggggaagttccttacgccggatgagccaatcttctctccaagtattatgaaaaacagtgtatttctgctcatcgtgggcgctggctttaacacatgttcctcctatatctcaagtcaggatattgtacagcgttttacaacaaccactgataccaaacagctgaataagatgatgcttaccaacggtgctctttccatctttatcgccactgtattctacttaatcggaactggcttatacgtattttacggacagaatccggcgctggcgcagactgcacagcaagatcagatttttgcatcttttatcgcataccagcttcctgtgggaatcacaggacttcttctcgccgctatctatgccgcatcccagtccactctttccacagggctgaattcggttgccaccagctggaccatggatattcaggaacgattatccaaaaaggaaatgagctttgaaaagcagacgaagattgcacagtatgtatcactgggcgttggtattgtagctattctggtttccatggtactggcgaatggtgagataaagtccgcgtatgaatggtttaacggatttatgggtcttgtacttggtgtactgggcggaacctttgtgctgggtgtatttaccaaggttgccaatactacaggagcatttgttgccttcggagtgtctgcggtagttatggttgttattaagtataccatgcccggagtttctatctggtcatactccattatctccattgctctttctctgattatcggagtgccggtaagctatatttccagaaaaatcaagggggatacttccgtacccgttgctaattccaccgtctttaaaaattaggaggcagttatgatatttggaaatgtgaaagatttggaagattatagttttcttccggaagagattaagcgctgctttgcctacgcgaaggagcatgacctcacaggttatgaaaaggggagccatacaatcgacggcgatgacctgtttgtaaatattgtggagtatgagacaacagccagggaaaaccgtttctgggaagcccacagaaagtacctggatctgcactttatgctgagaggggaggagcagattgacctgaacttcattgataatatggagcagaaagaatttgtagaaaaagatgattttcttcccctggagggtcctgaaaatgcacaaacggttctgacggacggagactttcttatctgttatcccagggacgggcacagaacggcaattgcggtgggggaacctgctgtgattaaaaaagctatcttcaaaattaaaataaaataagaccatccgtcttccccatagacggcaggtacacgctgatgtgcctgaatcagggagtaccgctgacggcatgtttgcggcactccctattgccatattatcagaaacggaggatgtcatgaagcaatatatatgtattgatataggaggaacatcaatcaaatacgggctgatcagcccggacggagaatttttagataccggggagaggcctacggaagcccatatgggcgggcctgcagtccttggaaaggcagtggagattgcccagaactatctgtccaagggcaacgccgccgggatctgtgtttctactgccggaatggtggactgtgaaaagggggagattatccatgccgctcccctgatacccggatataccggcacacagatcaaaaaaaccatggaggagacgttttatattccctgtgaggtagagaatgatgtaaactgcgcgggcctggcagagaccttcgctggtgccgcaagaggaaccagcagcagcctgtgtctgaccatcgggaccggaatcggcggggccattatcctgaacggtcaggtgctccacgggatttctaacagcgcatgtgaagtgggatatatgagtatggatgggagcacatttcaggatctgggagccagcagcatactggtaaaaaaagtggcgtcgaaaaaggggctgtccaggggagaagtgaacggcaaaatggtatttgatatggcaaagcagggagatccggactgtgtacaggctattgatgagatggcggaggtgctgggtaagggaattgcaaacatctgctatgtgatcaatccggagatggtagttctgggcggaggaattatggcccaaaaggagtatttatatgatagaataaaagcagcccttcaccggtatctgattcccgcagtggcatctaaaacaaagcttgcctttgccgagaaccagaatcaggccggaatgctgggggcgttctatcatttttgtgcaaaacacaagtaaggagccatctatggatcaatatgagaaaaccatcatcccgcttattgagtctatgtataacagctttacacctatagaaaaaaccatagctgatttttttattcataacacccaggctattgatttttcttccaaaaatatctcaagacagctttatgtctcggaagcatccctttcccgcttcgcgaaaaagtgcggattcaaaggataccgggagttcctgttccggtaccagcagggattcggggagaatcagcctgtgattaccgatgattctgccaagcaggttctgaacacttatcaggaacttctgacaaaaagctatgctcttcttgacgaacagcagctggatcggatcgtccatatcctttccacaaagaagagggtctatgtatatgggaggggaagctccggtctcgtagcccaggagatgaagctgaggtttatgcgtatcggggtgaatatggagtctatcactgacagccatattatgaagatgaactctgtccttctagacgaggactgtgcggtaatcgccatcagtatcagcggcagaacccaggaagttatgacctccctccgtgcagccaagacaagaggggctaccaccattttgatgacctccagacgggagaaagagtttcaggaattctgtgatgagattcttctctttgcagtgaaagagcatctggaaaacgggaaggccatatcgcctcagttccctattctgattatggtagatattttttattccagatttatggagctggatacgtttcataaagaagcactgcatgactatacgatggatattttgtacggaggacggtgagaggaagtacttgccgtaccggaaatgagggtatgtatatggaatatattcctgcgaaaacaattgtaacgaagaataaaagcactgcctggtttgggaacgactataccatgaatatttataaagggtgctgccacgggtgcatctactgcgacagccggtcagactgttatcgggtagaggactttgaccgggtgcgggcgaaggaagacgcgcttcggattgtccgggatgatctcaggagaaagacaaaaaagggggtggtggggaccggttctatgagcgatccctataatccttttgaggagaagctctgtcttacccggcatgctctggaactgattgacgctttcggattcggaattacaattgcgaccaaaagtgcgcttcttctgcgggatacggatgtcctgaagcagattcaggagcattcgccggtgctgtgcaaggtgacgattacaacggcggacgatgcactgtgcaggaagatagagccgggtgtttctctttcttctcagagatttgaaatgctggcaaagctgagagcgtgcgggattccagccggtatcctgctaatgcccgtgctcccgtttttggaggacagtgtggaaaatgtgctggagattgtggagcgggctcacgaggcgggggcttgttttatctatcccgcgttcggtatgaccttgcgggataaccagagggaatggtattataagaagatagaagagctttttcccggagaaggactggcagagcggtatattaaaagatatgggaaccgctacgagtgcagaagtcctcatgcggcaaagctctggaagcattttcaaagccggtgtgaagggtatggaattctttatgagatgaaggatattatacatttttacaaacggagttatgaagtgacgcagctgagcttatttgatttttagatgccaggaggatgcaatggagacgagaatagaattagagaatctgtataataccagagatctgggaggataccatacactggagggaaagaagatccgcccgaaaaggctgcttcgcagcggaacgctggagagggcaacggaccgggatatccggacgctgacggatgagtaccagatgaagacggtagttgacttcagaacaagggcggagatggaccagaagccggatcctcctattgaaggggtcacttttatacataacccgatcctcacagaggcccagatgggaatcaccagggaagaggagaataatgcaaagagttttatgaatatgctgatggagtatacccggaaaatacaggataacccaatggcgttcggggaggatatctatccccagctggttaccaatgaggaatccgtataccattaccggaggttttttgagatattgctggagcaggaggagggtgcggtgctctggcactgtacggcaggaaaagatcgggtgggaacaggcactgccctccttttgagcgctttgaatgtggacagggaaaccattttgcaggactatatgctgaccaatacctacatagagcctgagacccagaggatgcaggaaatggtttccaggttcaccacagatccggtagtgtttcgcacgctccgggtactgaacggagtggagaggggatatctggaatctgtatttcagacgatagaccgggtgtacggctcgctgaaggaatttctggagaaccagatgggcctgaacagggagcggcgcatggagttatgccacaggtatctcacagaataaaaagtttacgcattttttatgaggtttccattgacaatcccagccggttcttttatagtagagtttagtaaaagggagtagctgatgcctgaaaaccgggcgtgtgcggtgtcgtcaatctcgatggaagcagattccgtccgtatcgtaatgaaacagcgagacttttattgcatgactgatttgtgcaataagagtctcttttttgcgtttacagaaaatcagttgtgtaaactccccctgggaaggggaaaatatacctaaccaaagaacaattcatagtggagggattggaatgaagaagtattatcaaatggctaagtcagaggtccgcaaggagataaacggcgggctgaagcctctcacagacgcccaggtaaaggaacaccaggaaaaatatggtcccaatgagcttgccgagggaaagaaaaaaacagtgcctcagattttcctggaacagtttaaagacttccttgttattatcctgataatcgcagctacggtatcaggctttttgggggatgcagagagtgcaattgtaattctggtggttattaccatcaatgcaattctgggaaccgtgcagacggtaaaggcggagcagtccctgaacagtctgaaaaagctgtccgggccggaggcaaaggtgaggagaaacgggaacgttgtaaagatcccctcctccgagattacggtgggtgatgaggtcctgctggaggctggggactgtgtgcctgctgacggaagaatcctggaaaatgccagtctgaagatcgatgagagcgcgcttaccggggagagcctgggggtagaaaaaactcataccaagctggaaggagagaggccccttggagatcagaccaatatggtattctccggaagttttgtcacctacggcagaggcacctatctggtaaccggtgtagggatgaatacagaagtagggaagatagcgtctctgctgaaaagcacgtcagagaaaaagacacctctgcagataaacctggataaattcggacaaaaattatccgtcctgatcttggtgttctgcggtattttatttggcatcagtgtatttcggggggaatctataggaaatgcattcttatttgcagtggcactggcggttgcggccatacctgaggctctgagttctattgtaaccattgtgctgtccttcgggacccagaaaatggcccgggaacacgctattatcagaaagctgcaggcggtggagggactgggaagtgtctctattatctgttccgacaaaaccggtacactgacccagaataaaatgaccgtggaggattactacaccgatgagaccagaatctctgcagagaatattgactgtaatgacagtgtacagtatcggctgctgaaatacagtattctgtgcaacgattctactaatctcaacggtcaggagattggggatcccacggagacagccctgattaatatgggagataagcttggagtgactgcagcttctgtgagagagcagtaccccaggacagatgaaattccttttgacagcgacagaaaacttatgtcaaccgcacatatgctggaggacggatacactatggttaccaaaggtgctgtggatgtccttctggacagaatgacacatattctgaaggacggcggtatacagacttttaccccggaagacagaaaagccatagaagcccagaaccaggaattctccagagggggactgagagtgctggcgtttgcctgcaagcagattgaggagggccgccccctgacgctggaagatgaaaaagaccttacatttattgggttgatttctatgatggatccccccagggaagagtctgcccaggcggtgtctgaatgcatccgggcgggaatcaaaccgattatgatcaccggtgaccacaaggttaccgcggcagccatagcaaagcggatcgggattttgaaggaagaaagtgaggcctgcgagggtgctgcgattgaaactatggatgatgagcagctgaaggactttgtggagggcatttcggtatatgcaagagtatccccggaacataagatacggattgtccgtgcatggcaggaaaaggggaacattgtggccatgacaggggacggagtgaacgatgcccctgctctgaaacaggcggacattggtgtggctatgggcattacagggagcgaggtttccaaggatgctgcctctatggtattgacggatgataactttgccactattattaaggcagtggaaaatggaagaaatgtatacaagaacataaagaactccattcaatttcttctttccggaaatttcggggccatactggcggttctgtatgcttcgattatggcgcttcccgtaccctttgctccggtgcacctgctgtttatcaacctgcttacagacagtcttccggcaattgcactgggacttgagcctcactccagtgaagtgatggatgaaaaaccaagacctatgaacgagtcaatcctgacaaaggacttcttatctaagatcgggctggaagggctctgtatcggtattatgaccatgatagggttttatattggctatcagaacggggacgcgctgctggccagcaccatggcattcggcaccctgtgtatttcccggctcttccacggatataactgtaagtcggatcggccgcttttgtttactaaaagattttttaacaataaatatttattcggggcattttttatcggcctgtttcttatgacctgtgtattaatgatcccagggcttcacgggatttttaaggtacagacacttactctgacacaactgtttaccgtatatggtctggcttttttgaatcttccggtgatacagttcttaaagtgggtgcgcggcaagctgggcatctgacagcggataggggtagaaagtattaggtgaatctatggatttaggtaaagaaaatataaaaaaattaagaggactgatcatattcaccattttgattctggtggggctccagaattttggagtgattatcaatgcagcccggtttttgctgaacataatatttccgtttgcgttgggagcggcggtagcatttgtgctgaatgtacccatgcattttctggaaaagcacctgttccatgagaggaagtggaaagagaatcatgcggtcagaaagctggcccgtccggtcagtctgattcttaccatgtgtatcgtaatcggggttgtagtgcttgtaatgtttgtggtagttccccagctgggcacgactattatgagtctgggaaccagcctccagaattttgcggttaacctgcagagttggggagaaaaactatttcaggataatcaggagattgtagggtggatcaacagccttgagtttaattgggaccagatgattcagaccggcattgatttctttaaaaatggcgcggggagtgtgctcaactccaccttttcagcagcaaagaccattatcagcggtctggccaacttctttattgcatttgtattcgcctgctatattcttctgcagaaggagaagctgagcaggcagatgaaaaaaatcatgtacgcttttttaaagaaggatcatgtagaggtgctgaccaatgtctgttccctgtcctataagaccttttccaatttcctcacaggacagtgtgtggaagcagtgattctgggaactatgttttttatcactatgactattttccggttcccgtacgctctgctggttggagttttgatagcatttacagctttgattcctatctttggggcatttatcgggtgtgtaataggtgcgtttctgatattaatggtgagtccggtaaaggccattggatttatcgttatgttcctgatcctccagcagattgaggggaatctgatttaccctcatgtggtgggcgggtcagtggggcttccctccatctgggtgctggtggctgtaaccctgggtggcagccttatggggatcgtggggatgcttgtatttatccctctcagttccgtggtttatacccttttccgagggtgggtttaccaaaggctgaaaaagaaaaacataccgctggaacagatagaatgacagaagaacataagaagccggaaggagaacgtgagagaaaatggaatgtccaatgatatttgacagccatgcccattatgacgatgaggcatttgaaccagacagggaagaactgctggaatccatggcggacctgggggtaggcacgattataaatgtaggagccagtctgcggggcgtcagagataccgtgaagcttatgaagaaatacccctttatctacggggcggtgggagtgcatcccgacgaagtgggcgatctggatgagacacagatgatatggctgcggagcctttgtatggaagaaaagacggtggccataggagagattgggcttgactattactggaacagagaaaaccatgaggtgcagaagcactggtttgtccgtcagatggacctggcaaaagaagttggatatcccataattgtgcacagccgtgacgcagccagggatacccttgacattatgaagtctgagcgcgcggatgcccttacgggagtgattcactgttactcgtattccagagagcacgccagagagtacatgaacatggggtaccttcttggcatcgggggagtcgctacctttgccaatgcaaagaagctgaaggaaattgtagcatatgcccctctggattacattctgctggaaacggattgtccgtatctggcgcctgagccccaccggggggagaggaacaattcgtcctttcttacgtttgttgcccgggagatcgccaggataaagggtgtcagctatgagaccgtggtggaaaccacggccgggaacgccaggcggttgtttggcatataatatggatggggatgtcgctgccggcatctccattttccatttgttgtatttcgggggaaatgtgtttacaatctctataccgattggtataatagaatcatataaaggagatgctgctatggataacagagatatgctgatgcaggttgccctggaccttttttattccaaaggctatgacgccgtaggggtccaggagattgtggacaaatcgggagtgacgaagcctacgttatattattatttcggcagtaaaaaggggcttttggaaagcctgctggataaaggatacaggaacattgaggagtctcttgcaggggcctgcgcacaccgggattcgctgtcagacaccctgtatcatgtagccagatccttctttgattatacggcatccaacaggaagttttacctgttaatgctgtcgctgttctattctgccagggagaatgaggcctttcagaccgtttatccttatattcaaaggtattaccagagaattgtacagatatttgaggatgcagccccgcagctgggaaatatgagaggcaggcagaggcagtttgccgttggatttaccggggttttgaaccatcatattatgatggccgcagaatacgcggcccctgacggaagaattgagataaccaatgaggccacatatgagattgtacatcagttcatgtatggcatattttcataagtaaatcagtcataatactaaaaagacaggcaggaggtaacagggaatgaataaaaagtggtatgaagaggcagtattttatcatatgtaccccatcgggatgacaggggcgcccagggagaaccgaaagcaggagaccgtgcacagattcgcacagcttatggagtggctgccccacatagcggagataggctgtacggctgtgtatatcgggccgctgtttgagtcatccacccacgggtatgatacaaaggattataagcttgtagacagaagactgggggacaatgaagatttccggtgttttgtagaaaaggcgcacaagctgggaatccggatcgttgtggacggtgtgtttaatcatacggggagagaattttttgcctttagggatatccgggagaaaagggagggatccccctataaaacttggtataagggaattgatttcgggggaaacaatccctataatgacggcttctcctatgaggcatggagaaactgctttgagcttgtgaatctgaacccgtgggagccggaagtgagagaatatctcctgggggtgattgacttctggattgagacatttgatatcgacgggatacggctcgactgtgcggactgcctggagtttacgtttatggaggagatgcgcagaagaacccaggagaaaaaagaagatttctggcttatgggtgaggtgatccatggggattatggccggtatataggagacgggcagcgcctgctccacagcgtcactaattatgagctgcacaaaggactgtactccgggcataacgatcacaattattttgagattgctcataccatccggagggaatttgatgaaaacggaggtatctacaggggaatgaagctttattcctttgtggataaccatgatgtagaccgtattgccagcaaactcacggtcaaagcccatatgaatccagtctatacacttctctacacactgcccggcattccctctgtctattatggttcggaatggggcattaccgggaaaaaagaggggcctgatgacagtcctctgcgccccgcggtggaactggagaaggcgctggaggaaaatagggactcccgaatcctggaatgggtgagaatcctgggccgtatccataaggagcatccatgccttgcactgggacggtatcgggagctggtactgactaaccggcaatatgcgttttccagaacctgggaggaagatttactgattgttgcggtaaataacgatgaaaaggaagcgtctgtaaagatacctgttcctgacggggagagaaggtatcagaatgcggttacaaaggaagagatcccggtggagaacggaagtctgggcattactgtggaagccgcagggagtgttctcattacctggctgggcggagcgtaagcctgggattaaagaataaaagaaactaacggtaaaaggggaaagcttatgggtaaaaaattaggattttcggatttggatgagtatctgttcggggaagggacacattatgagatataccgtctgctgggcgcccatccgacaacaaagggtaagaaaaaaggtgtttattttgcagtgtgggctcctcacgcggcatctgtagctgtggtgggggagtttaatgagtgggatgaaaagaagcatcccatgaagcgcagaaagaatatgggcatctttgagctttttatcccggacgttaaggagggaagcctttacaaatactgtattacaacaaaagacggcgggcttctctacaaagcggatccctatgccaactggtctgagaaacgtccgggaaatgcatccagagtggcggatatcagcagatttacatggggagattctgtctggatgaataagcgccaaagttttgacgcagataaagatcccatgtctgtctatgaagtgcacccgggctcctggatgaagcacccttttaccgaggagaataaagagggattctacaattacaggcagtttgcccatgccctggcggactatgtaaaaaagatggggtatactcacgtggagcttatggggatagcagaacatccttttgacggctcctgggggtatcaggtgacaggatactatgcccccacatcccgctacggtacgcccggggactttaagtatctggtgaactacctgcataaaaataagataggagtgatccttgactgggtgcctgcccattttccgaaagatgcacacggtctggcggattttgacggcacacctgtgtatgagtatgcggatcccagaaagggagaacatccggactggggaacaaaagtctttgattatggaaaaaatgaagtgaagaattttctcatagccaatgcggtcttctggatggaggaatatcatattgacggactccgggtggatgctgtggcgtctatgctgtatcttgactacgggcgtgaggacggccagtgggttccaaacaaatatggggagaataaaaatctggaggccatagaattcttccggcatttgaattcggttgttctgggcaaatataaaggtacggtaatgattgccgaggaatcaacagcctggcctatggtgacaggcaagccggaggacggcggcttgggattcagcctgaagtggaatatgggatggatgcatgatttcctggaatacatgaagctggacccttatttcagaaagtttaaccattacaagatgacattttccctgacgtatgcatacagtgagcattatgttctggtactctcccatgacgaggtagtgcatctgaagtgctccatgatcaataagatgcccggggaggccagggaaaagtttgagaatctgaaagcgggctacacgtatatgttcggacaccccggcaagaagctgctctttatgggccaggatttcggccagcttcaggagtggagcgaggagcgtgagctggattggtatctgcttgcagaggaaagtcaccaaaagctgcaggattacgtaaaggaattgcttctcctctataaaaaatatccagccctctatgcaaatgatcacaatccccaggggtttgagtggataaacgcggatgacgcggataaaagtatctttagctttatcagaaagtctccaacaggacggaacaacctgctctttgtgtgtaattttacaccggtagagaggacggattaccgggtgggggtccccaaaaggaagcagtataagcttatactaaacagtgcagatcccagattcgggggctcctatgggaagccccgggaggtatataaggctgtgaagaaaaactgggataacagggagttttcctttggatatgaactgccgcccctttctgtatcggtattcttgtattaataggaggtgcccgtatgaataaagaaaaatggaccgcagccctggttcagatggattcccgggaggacgagtcccggaatctggaagcggctgccgggaaagtcagagaggcagcccggcagggcgcggatcttgttatgcttccggagacggtggattttatcggacgtgacatgaggagccatggaaagactgttccgggccctgtgacagagatgttccgggaattggccagggagaatcacatttatctccactgcggcagtatcacagaggcagcaggagaggaaaagtgcagaaataccagcctgctctttgatccccggggagagattgccggaagatacagcaaactgcatatgtttgatgtggagcttgcagggggaaaaatgatacgggagtctgctcagattgcgggcggcagccaggtggtcctgtccaaaacagagctgggaatgctggggtttggcatctgctatgatattcgattccccgagattttcaggattatgggaaagcaccaggcgcaggtgatactggtgtgcgccaactttacggaccctacgggacaggcccactgggagcctcttctgagagccagagccattgagaatacctgttatattctggcctgcgggcagtgcggggagaagtggaattatacggcccatggaaattctatgattgtggatccctgggggcggattgtggtccgggccgataaaaaggaacagattctgatgggcgaaatagatatgggactggcagttaagacaaggagacagattccttctcttgataatattaggcaagatgtctatgaattagtggaaaaatcagtaaaaatctactgacagaaggggaaaatctctttgcatttgctggaaaaacaaggtataataacaacgaatagagcgatagaatcggacaggaaaggagaaattggaatgaaagtatctaatattaaggatattgagaaatttttcgaagtaatcgacagctgcagcggaaaagtggaattagttacaggagaaggcgacagactcaacctgaaatctaaactttcccagtatgtttctctggcaaatattttctccaacggtgagatacctgaattagagctggtagcttatgagaaagaagatattgataaattactgaactttatgatgaatggctgattagtgaggcagataaaaaggcataatttagggacggaggtaataaccttcgtcccctttggcgttacttgaataaaaagagaggtagaaaaatgacaaagattgatattatttcgggatttttaggagcgggaaagacaacattaattaagaagttattgagtgaagtatttgcaggccagcaggtagtgctcattgaaaatgaattcggtgagatagggatcgatggaggattcctgaaggaggcgggcattgagatccgagagatgaattcaggctgcatctgctgctcccttgtgggagactttggggcatcattgaaagaagtcattgaaaagtaccaccctgaccgtgtattgatcgagccttccggtgttgggaagctttccgatgttataaaagctgttcagggtgtgcaggaggaagtagatatacagcttaacagctataccactatggtggatgtatcaaaatgtaagatctacatgaagaacttcggtgaattttttaataatcaaattcagtgtgcaggggctattatattaagcagaacggacaagacgccccaggataaggtggtgaaggcggtagagttaatccgtcagataaatgataaatcacctgtcattacaacacctattacgcagctggagggaagcaagatcctggacgtcatggagcatccccagtcgctggaggaagagatgctgaaagaggaagtgtgtccagtgtgccaagaacatcacgtccatgagcacgaccaccaccatgcccatggagatgaatgctgcggacatgatcatcatcatggagaggaatgccaggggcacggggaacaccaccatgaagaggaatgccaggggcacggacatcaccatcacggggaagaatgttgcggacatgaccatcacgatcatggggactgcggctgcggtcatgatcatcaccaccaccatgcagatgatgtgttcaccagctggggcaaagagacggtgagaacctacagcagagaagagataagcggcatactgacgaatctagagacagagggtatcagagaggacggcagtattctccgggccaagggaatggtggcaggtacggatggccggtggatttactttgatatggtgccgggtgagcatgagatccgtgagggtgcgcctgagtttacaggcaggatctgcgttatcggctctaagctcaacgaagacaagctggaagagcttttcggactgaaaatatgataggagacaaataaatggcagaaatagatgaaatagatgagattcaggttcctgtctatttgatggcgggattcctggacagcgggaagagcacatttttaaattttaccattgcacaggattattttgccctggaggagacaacacttcttattctctgcgaagagggagaggtggaatacgatccccgggagctgaaaaagtataatacggttatggaggtaatagaagaaccccaggagctgacgccccagcgtctggcagccatggacattgcctgccgaccggggcggatcgttattgaatacaacgggatgtggccggtgagcgctctggaggagatggaacttcccaggggatggggcatcgtccagcatattacaacagtggacgccagtacctttcaggtctatatgaacaatatgaaatccctgtttatggaaatggtaagaggcgcggatctggtgatttttaaccgctgcgaaaagggtctgcctctggccacgttccgcagaagtgtaaaggtagtgaatcagagcgcggagatcatctttgaggacgaacagggggaaattgaaaatatttttgaggatgagatgccttttgatctggatgccgatgtgatctccatccgggaagaggattacgggatctggtatattgatgctatggatcacccggagagatataaaggaaagaccgtggagttcacaggcatggtattaaaatcaaaagagtttccgtctaagatgtttgtaccggggcgcatggccatgacctgctgtgcggatgatactacctttatcggatatgtatgcagaagcccctatgcacccaagctgaagacggggcagtgggtaaaggttacggcgtctgtaggctacgattatgtgcgcgcttaccatggggagggccctgtgcttgaggcgaaatcggtagagctgacagatcccctcgaggaggaattggtatatttcaattaaggaaaagacaggagaaaattatgtatctgattgttggcctggggaatccctcaaaggaatatgaaaggaccagacataatgtagggtttgataccgtggatgaactgatagagaggcataatatcccacaatccggggtaaagcataaagccatgttcggcaaaggggtgatcgacggacagaaggtcatagtggccaagcctctcacatttatgaatctcagcggcgaagcggtgagggctatggcggattactataagatagatccggagacccagctgattataatctatgatgatatcgatctggagcccggacaggtcaggatccggaaaaaggggagtgcagggggacataatggaatcaaaagcattatctctcacctgggaacgcagaatttttaccggattaaaatcggtgttggggccaaaccgaagggctgggatctcgcagatcatgtgttaagccgtttctcagccggggacaggaagctggtagatgatgccattgagagggcggcggcggcagtttccgttattttatcggaagatatcgaagccgctatgaatatatataatagaaaggcagaataattgacctttttaaggagatagatatggaggcttttataagaccgctggaggagctgagcgattaccaggcgctccggggaagactgaaaggaaaccgcggaattctgcagctttccggatgcattgattctcagaaggctcatgtaatgtacgccatgtcccggaatttccgcaattgcctgatcatcacagagaatgatctgaaagcaaaagaaatatatgaggactaccgcttttacgacagggaggcgctgctgtatcctgcgaaggacctgatatttttccaggcggatattcacgggaatctgcttaccagggagagaatgaaagctgtggctgcccttcttgagaagaagggagtcactgttataaccagtatagggggctgcatggactatctgcttcccctggagaccatcggcaggcgggtgctgcggtttcgcaatgacagtgaaattgatatagacaagttaaaaaaagatctgattggtttgggatatgagagaagtgcacaggtagaggcagccgggcagttctctgttcgtggtggaattatagatatttttcctcttacggaggagaacccctggaggatcgagctttggggagacgagatagactccatcaggagttttgaggccgagagccagagatccatagaaaacctggaggagatagccatttacccggcgtccgagattgtgctggatgaggactcagcggagaagggaatcaaggccattgagaaagagatgaagtcctatgtgaagagactcagggataagtttctgacggaggaggctgcacgggtaaaaggctctgtggaggaagtactggagaatctgagggaatttgagaaccttcaggcggccgagcactttatccactatttttatgatgagctggtttcccttccggattattttgatccggaggatacccttttctttctggatgagccgaatcatcttctggacaagggggaggtgattgaagaggaattccgggagagtatgcagaaccgcctggagaagggatatcttctccccagtcaggccaggctgattaccgggtacagggataccgtcaatacactgaaccacaagaactgtgtttctgtctgcaccattgaccacaagcaggctgactggaagataaacggtaagtacagcattgtgacaaaatcagtaaattcttacaacaacagctttgagcttctggtaaaggatctgaagcagtggaaaaagggcggctatcgggtggcccttctctcaggttcccgtaccagggcggccaggctggcggaggatctccgggaggagggactgaacagcttctattcagacgatacggaaagagagattcagccaggggaaattatggtggtatacggacacgcccacaggggatttgcataccctatggtaaagtttgttattataacagagaccgacatattcggcaaggaaaagaaaaagcgcaggaagaaaaccgagtacagcgggaaaaagatccagagcttcacagagcttaatgtgggggactatgttgtccatgagaatcatgggctgggggtttaccggggaattgaaaaggtggaagtggagaatgtagtcaaggattacattaagatcgaatatgccggcagaagtaatctctatgtgcttgcaacccagctggatattctccagaaatacgccggcgcagatgcgaaaaagcccaaactgaataaactggggggccaggagtggaagaagactaagacaagagtccggggggcagtgcagaacattgcccgggatctggtggatttgtatgcggtcaggcagtcccaggaaggatacgcatacgggaaggacacggtctggcagagagaatttgaggaaatgtttccctttgaggagacagaggaccagctgttagccattgatgccacaaagcaggatatggagagccacaaaatcatggaccgcctcatctgcggggatgtggggtacggaaaaacagagattgccatccgggctgcctttaaagccatacaggaggggaaacaggtggtatatctggtgcccacaaccattctggcgcagcagcactataatacctttgtgcagaggatgaaggatttcccggtacgggtggatctgctctgccgtttcaacacccaggcgcagcagaagaagactgtgacagatctggaaaagggctgggtggatattgtcatagggacgcacagggtactgtcaaaggatgtaaagttcaaggatctgggccttctgatcatcgatgaagagcagcgcttcggcgttacccacaaggaaaagataaagcagctcaaaaaaaatgtggatgttcttacacttacagctacccctattcccaggactctgcatatgagccttatcggaatccgggatatgagtgttctggaggagccgcctatggatcggatgcctatacagacctatattatggaatacaatgatgagatggtgagagaggcaatcagccgggagatggccaggggcggccaggtttattatgtgtataacagagtaaagcagattgacgagattaccaatcagattgcaaagctggttccggaggcaaatgttgcctttgcccacggacagatgaacgagcgggaactggaaaaaatcatgtatggatttattaacggggagattgatgttctggtatccactactatcattgagaccggactggatatctccaatgtgaatacaatggtgatacatgacgcggaccagctcgggctttcacagctgtatcagctgcggggccgggtgggaaggtcaaaccgtaccgcctatgcttttttaatgtataaaaggaacaaaatgctaaaggaagtggctgagaagaggcttcatgctatccgggaatttacagagctgggaagcgggttcaagattgccatgagggatctggagcttaggggagccggaaatcttctgggcgcggagcagcacggccatatggaagctgtgggctatgacctgtactgcaaaatgctcaatgaggctgtaaaagaggccaagggaatacctgtacaggaagattttgaaaccaccatagatctggagctggacgcctttattccggagcggtatattcctaatgaatatcaaaaactggatatctacaaaaggatagcagggattgagaatcaggaagagtatgaggatatgctggaagaattgctggatcggtttggggagcttcctaagtctgtacaaaatctcctttctatcgctaatctgaaggcaatggcccataaagtctatatgacggaggtaaagcagctgcaggatatggtgaagcttactatgtacgaaaaagcgaagatcaatccccagggtatccctgcggttatcgaaatgtacagggatgaacttcagtttaaggcggatcccagcccgcactttatcttccgccccaaaaagaaaaagacccgggataccgctgagataatcgaaggggtggcaggactgctgagggatatggaggagaagctgaaagtttgaaatatttgcgaattctttacaaataccgggaaaaatcttgcctgaacctggaaaagagtctataatgaaaaggctgatatgcaaaataagccgataagataactatgggaggaaaccatgaaccgattaacaaagacaatgacatgcggtatgcttgcagttgccttgggcgccacaagccttgcaggctgcggaaaagatagtaaaattgacggaacaaagacagttgcgacctgcaatggggaggaagtatctcttggagcggcaagctttctcatgcgatatacacaggctcagatgatgagctattactccatgttcggacagagcatgagctgggacagcgtacaggatgaggagaaaggtactacccttgggcagtctgccaaggataaccttatggaccagctggaggatatgatgcttctgaaagagaatgccaaagagtatgaggtaagcatttcggaggaagaacaaaaggcaattgaggaggctgcaaaaagctttatcgaggctaatgacgaggagactctgaagagcctggcagtcagccagaaggatatagagacagtgctggagcttttcaccatccagaataaaatgtatgagccaatgactgcagatgtggacacaaatgtaccggatgaggacgcggcccagaaaacagttacctgtgtgagggtgtctgccgcagggacggagacggatgaagagggcaacaccattgagctgaccgaggaggagaaagcacaaaagaaggaacaggctcagcaggtcctggataagatcgcagcatcggaggatgtggcgggggcagatatggatgccctggcaaaagaggtggatgaaaacctctctgctacctccagcagctatggaagcgatgatactgttgtagaagatgcgatcaagaaggctgcggagggtctggaggacggacagctggcgcccgaggtggcagaaggagagaatgcctattatgtagtgcggctggacgctaatttcgatcaggaggctacagactcaaaaaagaagtctattgtagacgagagaaagcaggaagcctatcaggcaaagctggatgaatggagcgaggctgccaagtttacggtggatgaaaaagtgtgggacaagatagaagtcactgacagtaatccttttgtatttaagcagcaggagacagacgcagaaggtacagatactgcagagccttcctctgacgccccggatactgcgggtgcgcaggacagtgcagaacagggagagcaggcagaagaatagtactgcggataatagcagcgagccgggttaagaatcctggttcatggcaaaaaaacggagggtatatcctgggatatgccctccgtctgatcaccagggaatcctggtgatattgtattcaatgtatggtacataatcgtaatgacgaatgtatatgccccttacaagtgtttggatacagcgacaaagatacgcctcgttctgaaaataataatccggcgtgttacgcctcctggtagtctacctgatgcatatgctggatcatgcggaaaatctggctggtatagccccactcgttgtcgtaaaaacagataagcttgaagaaatgcccgttcacctggattccctctctggcatcaaaaatggaagcatgggaatctccgataaagtcagaggatactacctcatcgtctacgtagtccaaaattcctgccagttcgttttctgtggattcttttaccctcttacagatatcttcatagtttgtctcgctcttcaacataacattaaggtcgacaattgagacatctgaggttggaacccggtatgagattccggtcatctttccttttaaggaagggatgaccttggatactgccttcgcggcgcccgtactggaagggatcaggtttccgaacacagcccgtcccgtccgccaatcctttagggaacggcagtctactactttttgtttcgcggtagcagcgtgaatggttgacataaggccctgctcaatcccatagtgatcttcaagcactttgcagattggagcaagacagttggtggtacaggaagcattggatacaacgttcatatccctggtatagtctgcgtgattgatacccataacaaaggtaggagtctcttcatctttcgccggagctgatataataaccttttttgcgcctgcatcaatgtgtcccattgcctttgcggtggtgcagaaggccccggtggcgtcgataatatactctgcgccgcatgagtcccacgggataagagatgcatcactttctgaaaagacagggattttctttccgtttacgataatccccccatcgcaggtggaaagctctccccggaaacgcccgaatatggtatcgtatcggatcatatataccatataatccagatctgcgttgcggacattgattccgcacaggtggaatgtttcgggttgactgatggctatacggaatgaaaccctcccaatacgtccaaatccgtttatgccaatgttaatcgccattatttgaatacctcctcataagatacattgccgtgcagcagttcaggcacggctgacccggggcacgtgcagcccttcgggtatatattagtttttgcactgctccttctttgttatgacagctatattcctgtaccaagcgattttctttgttctctgcaatccagtgttagtttatcatgtctgccagaggaatactatagagcgggaagtaattaaagttttaacgtgaaagtacaggatgttgtacaaatgaattcggttttatgcccggttaacaggggataatttgaggatattgtacaaaaagcgctgagaaatacaaagattattgataaaatgttcacagaatgttcaaaaagttcacagataagacttctttataaggtattctattaagaagcagcagaaaggagagatgaatatgccgcatattatcgtgcagatgttccctggaagggatgaagcgtctaaaaaggaattggcagaaaaactggcagggctcaccgcggagaccctggggctttctcagagtgccgtctctgtcaccgtggaggaggtggccagagaagaatggaaggacagggtgtaccgcaagctccgggaagacaaaaatcttttggttcctccgggctatgagatgtaggagcgcagggtacatatgtatacgaaagatgattggtgcaggatagatggggattagtattgtaataatggaacagatgatccagctttttttgataatggtgatggggggagtcattgttaaaactggagtcttaaaggggcaggacagccatattctgtcggcagtgacactgtatctcataacgccctgtgtgattttggaggcatttcaggtggactataccccccgggtaaggaacgggcttttgttggctctgggggcagctgtcattatacacatactaatcctgctgtccctcccggcacttgggaggatattccggctggacgcggtggagaaggcgtctatagcctattctaactcaggaaatctgatcatccctctggtgacagccgccttggggaaagagtgggtgatttattccagcgcatttatgtccgtgcagctgttctttatgtggagtcacggaaaaatgcttctctgcggggagaagaagatagcgttaaggaagatattctctaatataaatatgattgctgttttagccggagctgtactttttatatccggatgcaggcttccttctctggtccggggcgccatggactctgcaggaaagatgataggacccatgtctatgctgatagccggaatgctgataggagatatgagtctgaaaaaagtattctcctaccgcaggctggggctggttacatttctgcggatgattgtatttcccgccctttccctggtaatactaaaatacagcccactggccgggctcacagaagacgggtttacaatacttttgattacactactggcggttgtcacaccaacggcttcctccatcacacagatgtctcagatatacggaaagaatgcggagtatgccagtgtaatcaatgctgcaacatctgtggtctgtatggtcaccatgcctcttatggtttttttgtaccagttataacacgacgttccccagacagcggtgtgtgaacagcgactgctatggggtgggggctgcggccggagagaaagggattgactttaagaaaaaaatatgctaatattccatcaatagcaaaaggcgttgagaagagatagtaagtatcctgaatacttcagagagaagccggacggtgcaaggctttgtggaggggtgctgaaccggtctttgagccgcaggccgaaaagagatgagtaggccccgccggagttccaccgttacagggaaagagtatcagacacaggatgtgttacgtactcgcagagagcagaatgtaagttctgaagttaggtggtaccacggataatgtatttattcgccctaaaccggagatttccggttagggcgttttttgctttatgacgcgttccggtgcgcgtgttcagcctgccggactcattttatgataatattttaaggaggaatcacattatgaagatggaaagaatagtaggagagcgttttaaggagcgtcctgcggactgtgtcattgacagccatgccctaatgatccggggcggttatatgaaatatgtggccaacggtatctactctcagtatgcccctttgaagaggatctgcaggaagatcgagcagattatcagggaggagatggatgccatagacggacaggaggtgcagtttcccgtagcgcttcccgccagtttgtgggaagagacaggcagatatgagagcgttggaaacgaactgctccgctttaaagacaggaacggcagcaaaatggttctgggcatgacacacgaggaggctgcggttcatctggtaaaagaatacgggcagacctatgccaagtatccgttcatgatttaccagattcagactaaattcagggatgaggcccgtccgagagccggacttatccgtgtccgggaatttactatgaaggatgcctattccttccatacgtctcaggaggatctggaagaatactatgagagatgctataaggcctacgagcggatcttcgcaagggccggcattcctgagaccatagcagtggcttccgattccggtatgatgggaggcagtctgtcccatgaattcatgcttctgactcccgtgggggaagactccattgccatctgtccggagtgcgggtacagggcgaacgtggagatggcagagagcatcattgagaatgaaaaggatgcagtccaggaagaactgaagctggtccacacacctgatattcacacgatagaagatgtgtgcagattcctgggaacaccggaggataagtcctgcaaagccgttgtgtaccagaagaatgccacggatgagtttgtggtgatctttatccggggcgatctggatgtaaatgagactaaggtaaccaatttcctgaaagaagagatacatcccggggagattacagagggatgcggccttctggccggatatatcggaccttataatctgccggatcatataactgtgctctatgacagttccctgaagggcgccaccaatctttcctgcggagggaacaaggaagaataccactatacagggctgtgtatggaaagagatctgccggaagcggaatatcatgactttgccaagattaaagagggggggatctgcccccagtgcaaaaagcctgcagttaaggtgtccagaggcattgaagtgggaaatatcttccagctgggaaccaagtactccaagagtatggagatgaaatatctggataaagacgggacagaaaagtatccaatcatgggatgttacgggattggcgtgggaagactggcggcctctgtctgtgaggcacaccatgatgaatacggccccatctggcctatgtccattgctccatggcaggtacatctgtgctgtgtcagaccggacaatgaggaagtaaagggatatgcggataaattatatgaggaactgcagagccagggcatagaagttctgtatgacgacagaaaagtaagcgccggtgttatgttctcagatgcggatcttatggggatacctgtaagggtgattgccagccccaggaatatgaaggagggctgctgtgagattgtaagcagagacaagagcatccagaagaaggccgggctggatcaggtgtgcagtgaagtaaaactgcttgtggaagagatgatgagataaattctgcagaaagaaagggggggccgggaatgccggccccccttcttttctgttgacagacgattttacatacccggacaggggcctgttgtcttgcggattaccagggttggctccaggataatccgtttcggttctacctgagattttgtcatcagtgagaccatcagctgtgcagcctcttcgctcataagttctacgtgctggctcacggtggtcagctgaatctgggagagattggcgtattcgatattgtcaaagcttattatggacagctcctccggtatcttaattccatggctgccgcagtaatccatgaagccaatggccagaaggtcattggccagcaaaagagcagtggggcggctgtctgcatctttagcaaaatactcctcggctgcctggtagccggtttccagtctccagtccttgttatagctgcagtactcttccctgtattccaggtgataattggacagggcctgccgaaatccccggtaccggtcataggaagctgtggaactctgatgatggcccgagatgaagccgatctccttatggccgagattaatcaggtgacgtgtagcgatgtatccggcctggaagttatctgtaaccaccagggagccatcgtagttcgaggtaatgcggtttaccatcaaaagaggtatatccatattggtgagatacttgtcggccgcttccgagttcacggtcacaaggataatacccccgtagctgtattgctgggcgatcctcatgtactgggcctctttatcgggatcatattcgctgttgaaggttgttacaatatatccctgctctgtgagatgacgctggatgtaaaaggccagatcagagtaaaagggatttctgatgtctcccaggattaaagctaccatattactggtgccccggctgagactttgggcgatggtgttggggtgatagccgatctcatcaacaaaatccaatattttttcccgcacggccttgctgacacccggggaattattcattgccctggaaactgtggagggggataccccaagcatttttgccacctccgctatggtataagaatgttctttcatagtgcactcctcattctcaatgttctgacgccaatacaagctttattacatattatacagaatccgggggaaaaagcaatgaaggcctcacccgaaaataagaaaaccgccgcattctatggaaaatgcggcggtttttacttaatgacaggtgagagaaaaaagaatttctctgtaagtttcccgttttgactcaaaatcttcaggagtagaagccaggctggcaatgacaagacgtttggttacgtcgcagtaggttgtaagctgcagcgacagtatagattcctccttgcccagggtgcggtataccgaatggtttgcacggatggaagactccatgagatatgccttgtgaggcaggtcttccacaggggtcatggacagtatcttaaaactgtcctttttgtttttcttctgcttcttctcatattggagctttatctcgtccatatattcatcaatagtggtttcctttttcagcttggcccagcgcagggccagagaggcctgatccggacagcttttctccgcggagcggtctatcttggcaaatccgtcgtggaacgcaaaggtcttgctgggattaatgtatacctgccaggtatccggatggaggatgcctacctgatatacctgaaacggaattaaatgataggtattggggatgacctcatgaaggtattcttcccgcggggcgggggcgaggctcgtcttgttaaaaccaaacatgtgcagcgtcctttcttgttatgtattatcttttatctggcatcagcggctttcgcattaacagaggcaatcgtagcgtctgtcagtgaggtaagctctgcgccggagtagataatggagtcaattctcttatggtattttgcaacaatttcttcgggtactgttgtgaacatactgacagctaccagaaggatggtgtttaccaccaaagcccagatgagtgcggaaaagcctaatgggggagcgataaagaaggtaaatataatagcaacaatcagacctgagacagtgcctgcgattgctccctctttggtggctttcttccagaacagcccgaatacggtggccggaagaatctgggcaaaaaatggtgacgaaagtttataggcataatccgtgatcgacgcaggtttaatggcaacaattacaagagtaactaccatgagaaccagaagtacaattctgccgaactttaccacctgttttggatctgaggtacggcccttcagctcatacacatgatgcagataaatatccctggatgccatagcgctggcagacaataataaggagtctgcagtggatacgccgaatgcgaacaggcagagcagtgagataaaagcaataaagggcggtgcgtactgagtggataaaacagcaacgatgttgtcaggctgtgcaaatccttttcccagaatggcaggtgccaggatggccccgatgataacaatgggggagtacacaagtacataagaaatcggcatcatccaggacatctgacggaagttctctttgctggaggccacgaaggtacgcataaaaatatgaggccagacaacggtggcaatggcgccggttaaggcgttgcccagcattcccttccagttgaaggtaccgttgggaccggggcaggacagaatatcataggtaccattctgctgcatgatggcaaccgcctccgcgaatcccccgttggggaagtaggtcatagtgagatatacaattaaagtaatcagagtgccgaatcccagcaccatatgaaacgtatccatccaggcaacagatcccataccgccgccgataatatgtaaggatactacaattgtgccaacggccaccgccacaacgtaggggaccattccctctgtggtgacaacgactgcatccccgatggcgatcagctgcatggcaacatagggaacgataaaaagaacaagaacgatggagataaataagccaaacccatcggaatagtatctggaacgaaggtagtctactggtgtggtaaatccatattccttccctaaaagccagagacggtagcccagaattacaaataagagtccggctaccataccgccggtatttgaataaaagccgattccgtctttataaatgcctgagggtgcaccgtagaaggcaagggcactgaaaacggaaatggatgtggtgcacagaagcacaaagggattcaggcccctgtcggctgtaaaaaacttttcagatgattcacttgtggatttaaaggagcgaaagccatgccagacgataaacacggcatagactagaattcctaaactgataaagattgctggtttcataatattcctcccgaatctcttatgaaagagttagtatcaatagattattttaaatctttctgtgtcttgaaaaaggcattaaagtatattccccagacgattgccgcaggtactggcagaaacagaagaattcccagctgcagcggcagccatccgaacaaaatcgggttggggagaactgtcacaacaatgtaatcgaaaaagaaataaatgatattaaagattacaaatgcaattttcactccttttttcataaacgttccactcctttcttcataaattttcctagatatattttaatacagggaatcgataacgagaaaatcgaaaataaatacgcaatcgatttctctttttcggtaaccaaataatagcacatgaaccatgaaaacacaatggggtttgtgacaaaaataaacaaattggtatataaatataaaaaatgagtaaataaattgtaaaaaatggacaaaaacagaggaaataacaggtggggtcctaaaaaattgcattataatagaagaatataaaaaatgcacaaacggaaggggtttaatatgtgaatgttatacattgacgataaaaaaatcatttgctatgatacataaaagagaaatcggttgcgtaaatgcaacctttgcggaggataagcagtatgaaggacggctatgaactatggaagggtagatgccccggagggatggaaagaaaaaccttgggggaaaagacaattgaaacgtttccgggccttatggataatctgtaccaggccctgagacacacagcagaaagatttccccaaaggccggcagttaccgataattacggaaaaaccagcagttatgcgcagctattggaacagacggagatactggcagagtttttgggaaaggaaaagcagataggcgagggcacgcatgtggggcttattctgtataacagcgtggaattctgcacggcatttctggccctgcaaaagctgggggctgttgccgttcctctgccgggaaagttcaggaaatccgaagtgctgcctctggcctgcagagcggaagcagaatatataatctgcgacgaggcatacgcaggctggttccctgaaatctatcccagagaaaagatggtggtagtgactgatgccgaaaaggggtggggatacagcgatgaatacagggcagccggttttaatgtaaaaaccagcggccgggatccatacccgggcggcgggtgggagaagcctgcgattattatgtttacttcggggaccacttccaagtccaaaggagtgctgttaaaaaactataatatcatgcacgcggttgaggtgtacagaagaaccctgggaattacggagagggatgtgtcggtgattgcaaccccaatctatcatatcaccggattagtagcccttctgggactgtttgtctataccggaggacatctctatctccacaagttttttgacggagcgcgcattgtggaggaggccagaaggtatggcttcacgtttattcacgcctcccctacagcctttaatctgatcatacaggcaggggaagggacgccctccatagaaagtcttcgttcttttgcctgcgggagcagcaatatgccgaaggataaactgcgcagactgcaccgatggctgccaaagtccagctttcatacggtgtatggcctcacggagaccacatctcccggaacgatttttcccgaagatgctgcttccagtccgtatatcggctcctcgggactgcctgtacccggtacgcggtttaagattacagatgagaatggcaaagagctggaggatggccaggtaggggaaatctgcatatccggtacgctggtgccggacggctactataagcagatctctgatacgcttcgggacggatggctcaggaccggcgacctgggatactttaaccgggacggctacttgttcgtggttgaccggatcaaaaacatgataaaccggggcggagaaaaaatctggtgctttgatgtggagaatgagctggaaatgatggatggaatacaggatgccgctgtgacagggattccggatgacctctacggggaggtggctgccgctgtggtctgcctggaaccggggagcggcctgaaacaggaatccattcagcagtatctgggggagagaatcgccagatataaagttccggtaaaaataaagattgttgatagggttccccagacacccaacgggaaaaccgataagattgccatcaggaaaatgttaatggaggagtaaagaatgttgaaagctaagtttattaccgcagaagaagcggccggatatctgaaagacggtatgaccctgtgtccggtggggatgacgctggtgagcgcgtgcgaatctattttaaaagggattgaggcttcctttctggaaaccggacacccctctaatctgacgctgctccactcctgcgggcagagcgaccggaaggatgggatacagcatcttgcccatgagggtcttgtgaagagaattattggttcccactggggtctgcagccccggtggatggagatgattgccaacagccaggtggaggcatactgcctgccccagggacagattgcccagctatacagaagcatggcctgcggtctgccgggaaaaatgtcaaaagtagggctcggtacctttgtagatcccagatatgaggggggcaagatgaatgaccggaccaaaaagctggatgacatcgtggaaattatggatgtacacggagaggaatatatgttttaccgggagatacctatcgatgtatgcctcataagaggcacggaatgcgatgagatggggaatctgacgactacggaggaggccatgaagctggaagtccttcccgcagtccttgcggctaagaggtacggaggaaaagtaatcgcccaggtaaagcgggtggtgcagacagggacgctgaaccctaaggacgttacggtgccgggcgtttttattgacgggatcgtggtgtgtgaaaatccagagcaggatcaccggcagacttcatcctgggtgtttgacccttcctacagcggacaggccagggttcctcagaatgccatagagcctctcccattaaacgtaagaaagtttatcggcaggagggctgtacaggaggtatatgccggatgcgtggtaaatctgggtacggggatacccaacgacgtaatagggaatatcagcaatgaagaagggatcaataacgatattatgattaccgtagaatccggtatctacggcggagtacaggccggaggaatagacttcggcatcggccggaatctgtatgccatgataggccaccatgagcagatggactactacaacggagccggcgttgacattacctttatgggatttggggagctggatggagaagggaatattaacgccacaaaaatggggcccaggtgtacgggatgcggcggttttatagatatcacccagaatgccaagaaagtggtgttctgcggtacctttacagcaggcgggtgcgaattttcctttgaaaatcaaagactgaccatagtaaaggaaggaaggatccggaaaatggtaggccgggcggcccaatattcctttaacgggaaactggccagagaaaagagtcaggaagtgtatgtggtaactgagcgtgcggtattcaagcttgtgccggaaggggtaatgctgacggagatagctcccggcattgacttaaaaacccaggtactggatttgatggattttgcccctataataagcagcgagctggctcccatggacgtgcggctgtttaaccagggacctatgaatatgaaactgtaaaaagagaggagaaacaagatgagattagaaggaaaaacagctattgtaacaggcgcaggcagaggattgggaaagggaattgcccttaaactggcacaagagggggccagtgtaatgatctgtgacatggtggaggagaatgcccaaagcgtggttaaggaaattgaggcgtccggaggaaaagcctcttaccaaatctgcaacgtagcggtcctggatgaggtaaacgcgttatttgagaagacactgagcacatacgggaaggtagatattctggtgaataatgccgggatcaaccgggattccatgctgcacaagatgtctgtggaacagtgggatcaggtaattgccgtgaaccttacagggactttttatatgacgcaggcagccgcaaagctgatgcgggaacaggagagcggcgccattattaatatctcttctgccagctggctgggtaatgtgggacaggctaattatgcggcctctaaggcgggcgtggttggactgacaaagacagcggccagagaactggcaaaaaaaggggtaacctgcaatgccatttgtccgggctttatagagacagatatgaccagaggcgttccggaaaaggtgtgggacattatggttggaaaaattcctatgggccgcgcaggcaagccttcggatgttgcgaatatggtagcttttctggcttcagaggaagcagactatattaccggagaggttattaatgtgggaggcggcatggtgctgtaaaaaaggggcagaggacccaaaagaaaggatgagaggaaatggaacagaataaagtagctgtaatcggtgccggacttatgggcagcggcatcgcccagacctgtgcgcaggccggatatgaggtagtaaatgtggatgtctttccaggtgccctggagaaggcagaggataatctgaacactctgtttgacaaaaaagtgcagaaagggaagatgacggaagaggaaaaatgtgagatcctgggaagaatatcctacagcagcacatacgaggatgtgaaaggcgcgtttctgattgtggaggcagttcctgaaaaaattgatataaaaaaggaaacctttgcaaacctggatcaatatgcagatgaggagaccatcctcgtttccaacacctcaggcttaagtatctcagagatcgccgccgccacaaaaaggccgcacaaggtaatgggcgtccatttcttctatccggcacctgtaatgaagctggcagagcttatccgggggcttgccacctccgacgacacctaccgcacggtgcgtgaatttacagggcgcataaaaaagaccatagtagatgcccctgaattcccgggctttatggtaaacaggattctggttcctatgcagaatgaggcggcatttatggtaatggaaggctgcagaccggaggatgtggacaatgccatgaagctgggggcaaaccaccccatgggtcctctggagctgacggactttgtaggggtggatgtgatgctggcaaccatgacgggtttgtacgaagggttccacgacagtaaatacaggccctgtcccctgctggagactatggtgaaagccggtcatctgggacgcaagagcggccggggattctacaaatatgagtaaacagcagatgttctgataaaatgaggaggaaagtaatatgaaagaagttgtagcagtaagcggtgtaaggctcccggtgggggcttttgggggaagcctgaaggacatttccgctatcgatatgggagccatggtggtaaaagaggcagtaaaacgtgcgggaattgcaccggaaaaggtggatgaagtcatcatcgggcaggtagggcagatcgcagagaatggatttgtagccagggccatcagcctcaaggcaggacttcccaatgagactacagcatactctgtaaaccgacaatgcggatccgggcttcaggccattgcggacgctgtgatggagattcagaccgggtatgctgacgtagtagtggccgggggggcggaaaacatatcccagctgccttattatgtgaaggacgcaaggtggggggccagaatggggcacaaagtttttgaggacggggtgattgatattctcacatggccgttaggaccttaccacaacggcgtaacggcggaaaacgtagccagggagtaccatgtgtccagagaggagcaggatgcctttgccctggaaagccatagaagggcagtacaggcaatcaaagacggaaaattcagggatgagattctccctgtggagttaaaggatcggaaaggaaatgtcactgtgttcgacaccgacgagggtcccagagacggacagaccatcgaaaagctgcaaaagctcagaccctgctttgtaaaggatgggacggttaccgcggggaatgcctccagcctgaatgacggggcagctgcggtggttcttatgagccgggagaaggcagaggaattgggaataaagccggtgcttaccatcagaggatatgcggtggccggcaatgacggggcgcttatgggctatgcgcctaagctgtccagcgaaaagctggccggaaagctgggattggatttacaggacatagacatgtttgagattaatgaagcctttgccagccaggcagtggcggtatccagggatcttggcctggatatggagaaagtaaatatatacggagggggaatctccatcggtcatcccattggggctacgggcgccgtgcttacagttaaggtaatgtatgagctggcgcgtacagataagagagatgcaatgatcagcatgtgcatcggcggaggccagggaatctctatgtattttacaaagtgtgaatagaacagcaggaaaaaccggatatcagtccggtttttctgctgtctgaacaaagggctcagacaacggcggctttccgcattttcttaggcattcttcgtttttacaggtgctgcagtcatgaacggcggcaaagcaatcctgattgtgggttagctccagaatatagcccatactcctggggggatgaaagacatagctgtcgcttacagtaactcctgtatgctggtttttttctattttctttaggatgatctgctgtgctttccagggcagctggccgggagcttctaaacgccttttgattcccacctcccttcttctgcactctgcctttactgcagcagctacggcctcatccatagagaagagcagctcttcggcggctttatctgccagcagtcctttcaggagggtgtcctttgcacaggagacaacataaggttctgcctccctgcccagggtgagcaggcagtaccagtgagctttgccaaagtagatccatgcacagggagatacggcttttcgcagaccctgtacaatttcgggatatattttttctgcttttctgtaagacggcatcccgggataacactctgctgtccggaagatgcgctctttcttgaacatgagatcaaatgaagttattgtctttatcttttccacgatgattcattctcccggcttctgccctgctgtattcttttctacttaaatactacggtataaatctgcaccagcataatgacagccagtaccatataaaacatcagccgtaccgtcttttgcgtaatcatatcagtgaccttccgcccgatcaggccgccgcagatccctgcagggacacagtagagaaccagagagagatctgcgtatccgctcatggtatagcgtaccatagaaccggaagttgtgagaagggttattaagatactctgtatcgcggcttcctttggctccagatccaggaacaccagaagcacagtcattaaaaacggcccgccccctataccgaaaaagctggaaagcataccgcagctcataccgagaagcaccttgaggagaggattctccacggccttcatctttactctctcccgaacaattacagataccagcatgaccagaatggcggccaaatacgctttgtttacagtatctgcagggacatatgccatcatggaagcgcctacaaagctgccggcaatccctccgaagcccatatagacaatattatttagttttaccttattgccctgtgccttataggtaatcagatttgtagctgccattgcaaggacggtaaaggatgaggtgaaggaggccagaccttttgagacatcaaagagattcagcaggggccgcaggatcatacctccccccacacctactactgtaccgatgacagtggctgccaaagctaatatgaagtaaaccatgggatcccctcttccttaaaatagtttcatgcctttgcagaactggtaagctcccataataatcagcatggtatacacaagaatagacacaatttttttattgaatttcttaaacaggtgaaggccggcgataccgctgatgataacggcaacggccccgggtatcaggtattttactgtctcagtggtataggaacctgacatgaatttgaggatagtggcccacccgtacatcataaaaaagttaaattcgatacaggccttgtattgaaggggagaatccgccgctgcattatagtagatggccagaggcggtcccccgatgttcagcagtcctgtaaaaacgccggctacaaatcccgcgatccctccgttagcataggtgggcttgatcttaatggttttcttcatggtagcaaagaaataaatgcctacaattacaagaaatacgcccaataccagctgcatcgtggtggctgttgtaaatgtcataatccacgcgccgatggctgtgctgataaaggataccacgaggggtacaacactcattttccagttgatatttttgtggagcttaatggtcatctggataccaataattgtgagcatagccggggtcagtgccgatgcttccggaagggcaataaccagaggaagaaaggacatccacaccatagcggatccaaagcctgtaataccctggacaaacgctccggcaaaagcaataacaaataccataatataagtaaacataatcatttcacctcccaaggtctgattatattagatttgctacagcactttgtacatggggtgttcttttgtcaggggacagattcccccggagcgcttcccgtagacgtggaatgcgtttactgccgcaacagagggcataacccagcggcatccgtctatgggaccgataaatagaaaattacatccgtttgctgccagataggagttaactgatgcatccacggctctgaactgttcagtgctgatgatttccttgtttcttagccaggggctggcgtaggtggcgttggacggcgccgtacctaccggaatccccagttcctctttgatcactctggcggcataggggatggtccccatattagagagatccagcgcgggaatatctaccataatcttggtcattcctgcccgggccgctttgtccaggaagccctccttttctcctttgccagtgagtaccttatatggtccgtcagctttcttgctgccgggattgtaagcctgaatgacagacgcctgaatgggtagccgggccagaacgtccagctcctctgaggtgctgaagccattgatggagttatagacgattccgtccagcattcccctgcggttaagctcctgaagcgctgcaatccgtacctcaggcagagtagcatttaataaaatcggggcatcagtaataccttttaaaaatgtaatataccggatcagggcttcaggggtattgccgatgacgtcaagcatgtactttacccccatctgttcggatagtgtattgcaggtttttatcagcgcacctgccttttcctcgtcaaagcttccggtttggggatcctttacaatccggtggttcatataaaatatactgccgatgagtaccgtggggatttccccgtaatcgcccccgatccttacgttgcctattgtaaaatccttttcaaaacagtcatatatttttttttgctccataaaagttaacctccgcttggcgccgggcattcaggctgacccgttccgcttaacattttccgtattttttcatagcgttcatccaggcttttaccagctccggctttgaggtgtcgttaagcatattgggtcccatcaggaaataaccttcatatcccctggcgtatgtatcgatatattcttttaccagggcatccatctcatcttcggttaggttagcgaaggcagcgggcgctattccgaaccacaggcatgccccgtaagtcttcaggatatccaggatcttcctgatatcacagtttaatgcccagggcgtagccacatgaaatacggtattgccggcttcacaggattcagtaacaaatttctctatatccgccacctcatcaatgccggactgggaatgccatcttaccccgggcggagtcatgcaggccaacgccttctggatcttcatataggcaggcataaataagtcgttgtattgttcaggactgcacagggacggagatccggtggcatctgccatggagattcccacggcgccccgatccaaaagtgcctttcctatggttatcgtcacatcagcacagtagtccagcaattcccgaacaaagtcaggccgtcttttcatgtcgactacaaacttgctggcgcctctcaggcagcaggcaagagagattggaccgcttaaatggccgataacaggataaatatccccgatcttctctctcagcagcgctacggtattgagaaccacggggagccttccgtctgtttccgggttaattgctttcaggagcttaagatcctcgggttttttcagcacggcagcccttggaactgagactgcgtcctcgatcatatcaatgtctacacccatgatttcaggtgtgacagagtagagatccacgttcgtccatatggtgtcaaagccgaattccactaaccctgcaagcatagattcacattctttcagatagtcggtctccagatcacggaccttatagtttactaaatatctggggtattccctgtaaaatgcccaggccataaggcggtcaggctttgcgtggtggacgtttacgcaattgaatctttccaggggtgtcatccgttcccctgaattttttacctgttcatgcagctgtgcggccagcctgtcaattctttcatttgatttcataattttgaactccttccccgggctatgcctgtaaatcatccattaaacggttgcacacccgaatgcactcatttccatttttcgaccatgcatccgccagtacctgagctgcagtttcgggattcgtggaagcccctccgatggtgattttaaccttacctctcagtccctcagcttccagcttttctgcagtttccttcatatacttcgtagtctgcagcatgggattggacatggcgaggatatcggcattgacttcttttactttgctgatgaaggtgtccggggatacattggtacctaagtcatatactttgtagcccgcgccgctcagcatagccgcaactatattctttccgatttcctggctgcattcctttacaaccccaattactatggttcctttgtcctctccgtctttttgctccaacaggggttttaaaatatccagcgcttctgtcatggcgtccgcagaagcggccagatccggaacaaaatactctttctggtcatacttgtctgagactatctgcatacccacaaccagagccttgtcaataatatctgcagccggaattcccgcatccagcgcttcctggacaagctctgcagcatcgtccccttccccgtccacaatcacgtcaatgataggctgaaaatcaaaatcgcacataaaatacctcctttggttcactttttacgggttacttattaaaatatagcgctataaataaacacaaagtgcttatatacatttaaacgtatatacgtttatacctttataaaaagcgcaagaatacttgatgtattctaatgcgcatggttttcctgtttatcttgttacactaaaatagtatcggcatctgtcgccgcggatcagtgcatggctgtatattgccggtttattatcatgctgataaatgacacggtccatgaccagtgcaggcagaccttcgtcaagatctaaaagttttgcatacttctcgttaataatggtgggctctacaaaagcggagacccgggtcagattaatattgtaatcctgtacgagtatctcagtcagcagttcagtgtcaaagttgcgctgctccagacctggaaacgcagcggcctccagatagttttcctcgtagatccagggctcttcatcagcccagcggatgcggatgagatgaattacttctgatttcttatctatctccagtctgtcagtgatgcttcttttgcctggaataacttcttttaataaggtctgagtcttcagggtaagcccctgctttcggattcccataccgaagctgtaatccccgagaaggtcgtggttcagactgggcctcctcacacaggtgccctttccccgttcctttgtgacataccctttttccgccagcatattgattgcctgacgtacagttccacggctcagtccaaaggtatcgcacagttctgactctgacggaaggagatctcctgacttcaggactcctgtctgtattaaatggtagatctgctctttcagctgataatataaaggcaccatactctgtctgtccaatgtaatgtccaaagtggtgaccaaaattttacctcctttttgttactgtttcttatgaagtggtttcaatataacatataaacgtatagacgtcaatacaattagtgattagtataatatttaacgaaaatttcgtgataacataataaattatctcatcttttttgtgcattatatcttgtaagacacacatattggttttttcctgacattctgtggaagtgtatggaatcatgaacgaaaagggtctgaaatgaaggagagccagcatcctgcgggggatgctggctttagaaaaagaaaaagttttgcgttaggttgttggcctcttaacaattattataatacaggtaaattgtgatgattctgtgatgaagagttgaaaaaaatataaactgtgtataaagactttgggattggtccctttggctccaattgaatcaaaaggaacaagaactataaagtttattctgtttctgaatcaaacgcatatattcattcttaatatcatgaatgcgatgtttgctgaggggaatacggctgtcatcatctaaaattacatttttggattctatactaaaaatatggatgtaatttaccaggtatgatttgtgcactctaaggaaaccaaaagatcttaacttttcttccagcatctgcatacgggaatgtatctcatacatctggtcctgaatatggataagttgtattttgtcgatactttcaatgtattcaatctgagaaataggtaaagaaatgagcttgccgctgctttctgcaacgaacagattttcacttttctcattgtgataagaaataatacaggttacggcttcatctatctcctggcgaaagtgacttttccggacaaatcttaaaggccgcgtttgaagggcagagtataccatttcctccttactggaaatataaattagtggtaattcacgtgtctgggttatttccatcagttttttggccagcataattccgttgagcgcaggcatatcaatatcaagaaaaaacgcatgatatgtagtgagtggagttgactggagcagtttatatgggtccgtataggaatgtagatttatctcctgcccatgcagctggaataaatgctggattgatgtgctgagacatttgcaggcgtggggattatcatcacagattgcaatgttatatatcataattttctcctttgactgttagggggtacctcaagatccttcacgattaaagagacctgaaatagttcgccatcctgtgagaaatggatggctccatcgtatttttctactacacttttaacaatacgaagtccaatcccgtgagatgaggggttactttttgtggttttcatagaaggattattctgcagacgcatagcttccgaacggtttcttaatatcagtgagacatacattttttcttttagtaagttgccttcaacaaaaggttcagacacatgctcgctggcttcaatggcattatcaattaggttaaagagtaaagcacttaaatctagtatattaattttcaactcttcaggcagagaagcagaaaaggcaaagggtatagcttttgcttctgctttcctcttttcgtaattaagtatggcatctactgtactgttcccgctggtatatgtattggtgctgtccacatagagctcttccatttcgttaaaatattcttctaaatgaatcaaatcccgatttcttaaataatttcccatcatgtatatatgatttttaaactcatggcgaagtgctctgatctgggataactgttctttgacattttccacttctagtttgtttaactgcatacggtgaaccttttcgtttgcaaattttattttttttgaatgattcagtgagttaacaaagttaaagtaattcagtatgctgatcagcatgagcagtaagcataacaggactctgtctctgggcctggacacaaaatattttgcataaacccagtctgaataccatatgagcagggccactagtgtattgcccagaaaatatagagtgtttatcggaaaatctggttctgtataaaatttatatattataaacacagttagcaggtaaccagaaaggcagagaagtacagtcatatagttaggtaatggaaaacaggataggaacccaaaaaatgtagtagtcatttccatataaattgtaataagggtaagtttataaagtaaatgccgtgttgaagattttaaaattatgtatccccaaatggacagaaggtaaaggataaaaattataagtaagaaaatagcagtatccctgaaacttacctgatcaagacaccatatataaagtatgcagatatttgcagacaaaattagaatcagacatgtaaccttccagcatttaatcttccatgtagactcctccggcacgtacagccgtgaaaaaaggtatagaatactcaggggctgacaaatgtatagaattagtacaaatatataattcataaaaaaaacctcctgcagaattctataatatagattatagaaaaaaggccttttaaattcaagaggactattttaaggaactagcataatattgttctctgcccacttacggcgtgaaaatcccctgttgctctgcctatattgaagaaaagacaggagcatgatatatataacacataatccaaatcatgtaaggaatgcagatgttttcagaaagttatttgcattaatcaaaggaggtaaaggatatgggaatatggaaaaagaaagggattaaaagaagcaagaaaatagtgggtttatgtcttgcagcagcaggagcaatagcaacgctgggatttggtgcaaatgatgttcaggccgctaatccctatatgtctatgtgggaacatgtgcctgacggggaaccccatgtttttggggacagggtttatgtatatggttcccatgacgtcagcggcagccattactgcagtaacaattatgtgtgctggtcagctccggtagatgacctaacagagtgggaatatgagggagttatatttgagacagggggtccggatgacagtatgatggataccttattggctcccgacgcctgccagggacctgatggaagatattatatgtatctgttcggagggggagtaggaggagcggccattcttgtaagtgatgaccctgccggaccgtttgaaatttatgcagacgggaaggaatgcgagtttggatttgaccctgcagtactagtggacgatgataactctgtctacgtatattccggaagcggcggttcatcaaccgtatctaagatggattcagatatgaagaccgttttggagaaaaaggagatgctcaacacgaatggagaaccggtggagcggttttatgaggcatcatcaattcgcaaggtaggggataaatacgtttacgtatatagtgcaaaacgtgtggatgagcctgggtttgtgccccagacagacgatggacgtaagaatggatacaggggaactcttgaatattcctatagcgatgatcccatggggccctggacgtatggcggtattataataaataatggcggggagattctaagcgatacggagaggagctattacgacggcaacaaccatggaggaattgaggaaataaacggagaatggtatgtattctaccaccgccaaacaggtactaatgaattctcccgccagggaatgatagaaaaaattgatgtttcagtggaagacgggaaagtaattatacctgaggcagaaatgacttcacagggtgccgagtatatggggctggagtctgagaagaaatatcaggcagctattacatgctatctcacgaagggagcctatgtaagtacttatcgggattcttcatcggattataaccctattgtgaatattaaggatggagttgttgatggatataagtatataaatttcaatggaaaaaattatgatcttactttggacattatgcctaaaggtcagtcgggcactatctcagtaaagctagatgatcccaattctgatcctatagcagaagttaacgttgaaggtgacccctctgacaaaatacagcaagtgacggtaaacgcaggagaaatagaaggacagcatgcagtattttttacttttgcagcagagggtgatggggaaatctgtgaatttaatgcatttgaatttaaagaagctcctaaaaatggctggctgtcagagaatggaaaatggttctattatgaaaataataatagagtaacaggctggctgcaggatggagaaacctggtattatctgcagagagacggtgagatggccacagggtggattaaaccgggaaataattggtattatctcagagcaaatggagctatggctactggatggataaaagaaggcagcagctggtattatctgagcgatgacggggcaatgaagacaggctggctgcaggatggaaaagcctggtattacctgaagggcagcggagcgatggcaacaggctggctgcaggatggaaagaactggtattatctgaagagcagcggagcgatggcaacgggctggcagcaggagggaaggacctggtattatctgaagagcagcggagcgatggcaacgggctggcagcaggacggaaggacctggtattacctgaagagcagcggagcgatggcaacgggctggcagcaggacggaaagacctggtattacctgaagagcagcggagcgatggcaacgggctggctgcaggatggaaggacctggtattatctgaagagcagcggagcgatggcaacaggctgggttcaggcaggaggcaagtggtattatctgagaagcaatggagctatggcttataatacatggattggaaagtactatgtaaatggttcaggagcctggacaaaaacaaaataaaaggtaaactgcaggggactgccgcacgaagtaatcagtgcggcagtctccttttactgctgaggagacttatttttgagaccataacactataattcacacagcttaataacctcagatagaaatccctacttcttttttatctcccaatatagtataatgggtaaacaaagagaggtcggattgaatatgagtcaaattagaaagagtattctcccggtaacagcagggctgattgcactgatgctggttaccgcaggaggatgggggtattaccgctatattgtgaaccgtatacctacagaggagatggacgacggcaagacctaccagtatcattatatgctgattgccgataatatcagttcccctctgtggcaggcaatttaccagagtgccaaagaggccgcggcaaaagaaaatgcatatctggagtatgtgggcggcgatatggtgtcggagtataacacagatgactacctggagatcgccattgctgctaaggccgacggtatcattgtagagccaaacggcgacccggaggtggagcggctgataaacaaagctactgccaataacatacccgtggtaacggtgatggaggatgcctccggcaccaaaagaaaaagttttatcggggtcaacagcttccagctcgggcaggagtacggggaggttatctgcaaaactttgacagaagccaccaggaagattctggtgctgatcaatggagacattgaggaccccagcaagaatctgaccttttcacagattaagtcagagataaaggagcattctccctacggcgatcaggtggagatagaggcgctgaggattaacagcggcagtacctttgagtcggaagaggcaatccgggatgtgttcctggattcccagatactcccggatattctggtctgcctggatgaggtagataccaaatgtgcttatcaggccctgattgattataataaagtgggtgagatggacattataggcttctatcctacagagtcgtttttaaatgctatttcccggggaacaacctcggcagcttttgagctggatacggagcagataggaagatacagtgtggaggctctgcgggagtacagagagatgggatatgtaagtgaatatttcagtgtggatctggagctgataaccaaagaaaatgttgcggagtatatggaagagtaaagagagaataaaagtatgagacattggaaacagatcataaaggatttacctatcagaaaaaagctgatcctctgctttggatttacctcccttctgctgctggtaagtaatttgctgctctataaggaggtaaaccgatccatcaaccggatcgatcagatttatgtgagcaatattactctcaatgatttatcggatgccctgaccagcacccatgaggaggtatatgagtatctgagcaccaaaagttcctcagcgctggagaattattacagaagcggacagcagtttcgggatctgctggaggacctgaacggggaaacccgggacaaccgtatgcttctgctggagaaaaatattaaaaatatgtctgatacgtatctggctactgcggataatacggtagccgcaaagagaggacgcaatatacagcggtataaagactgctatgcagaggccgaggagctgtaccggtatattacttcttacatagataatctgaaccggcagcagtttcaggtaaattccagcagctacaaaacccttctggtttctctgcaatatatggaggtcgtaagcacggcgatccttatatttgtggcagtggtcaatatcatttttctggttctgcttacccaaaatatcataggtcccttgattctgctggcccggactgcggacgaggtggcggaagggaatctgaatgctccgcttttggaggttacatccgcagatgaggtgggcactgttacaaaagccttcaatcagatggtttatagtatcagggaccatattcagagaacgaaggaaagtatggaaaaggagcagcggatgatggagcgggagctgctaatgaaaaaccatctcaaggatgcgcagctgaaatacctgcaggcacagataaacccgcattttctctttaattccctgaacgcgggggcacagcttgccatgatggaggatgcggagaagacctgtctgtttgtggagcggatggcagactttttccggtataatgtgcggaagatgtccgaggatgccactctgggggaagagctggaggcggtcgacaactatatttatattttaaatgtgagattcgcaggggacattaattatatgaaagagacagatgccggtgtggaggatatccgtgtccccagcatgatcctgcagcccattgtggagaattctgtgaattacggaatccgccacatggagggggaggggtacatccatgtaaccgtaaaaagagaaggcggacaggtaatcattaggattaaggataacgggaaggggatggagcctgagaagataaaagctatactggagaatacgccggagggccatagggggcagtcagaatccaccggcattggaatcaataatgtaaagagcaggatggaactttattatgaccggaaggggctgcttcagatagagagcagagggccggatcaaggtacggtcgtgtcacttatcattcctctggagacagagtaagtacacgggaaggagaaggatatgtttaggatattgctggcagatgacgaaggaattatgttggaatccctgagaaccattattgaatcaaactttaagggcacggtagaaatacagtgtgtgaaaagcggtcgggcggccattgaactggcagaaaccttccggccggatattgtctttatggatatccagatgccgggaatcaatgggattcatgcgatgcaggagatacgtaaattccatacatcggtacattttatcgtaatctctgcctatgataagtttgcctacgcacaggaggccattaatcttggggttttggagtacctcacaaagcctgtaaaccgtaaggtagtcatcgacgttctggtacgggccatgcagaaggtagaggaagaacggcggaaacggagcgagtccctgaaaatccaggaaaagctggagacggtgattcctgtgatagagagcgggtttatttacaaccttctgctgcaggaagaaaggaacagggaaaccgggaattacaggcagcttctggatatcagggaagaatatggattcatgatggtggtccagtttggggaagctattacggagggagtcttaaccaatgccgtgggaatgagtgtaaaagcacagtccttttactcgcagtttcgggaaattatcagaggctttttctactgctgtatcggcccggtgatgtccaataagatagctttgtttgtaccctgggaacaggggggactgacctatgacgagaggatccagatcatagagaagtccaggaatatggtccgccgtctggaaaaagatatagatgctaagttcaaagtgggcatcggcggggtaaagccatttgaggaacttcaggattcttataaagaggcatccagagcattgacagagagcaaggggcgggttgcccatgtggaggatttgcccatcggatgcgggtatgtgggggattatcccgcagatacagaaaagaagcttttccagatggtcctcagaggggatacggacggcgccagacagcaggcggatctcttttttgagtggatgctgcagaattacccggactgccaggcagacattcagataaaggttctggagtttgtgatgcgggcggagagagaggcatttctcaatggaggaatgacgtatgaattccgctaccggaaggattacctagagcaggtaactggatgctccagctacgagggactgcgcacctggtttctgcagaaaatcaccgaagtgtgcaaaaacatcaccagtaaacaggaagaacagacagaaggaatcgtaaccagggtaaagcagtacattaagtccaatttccaaaaggatatttctctggacggggtgtctgagatggttaacataagcccatattactttagtaaggtgtttaaggatgaggccggggaaaactttattgagtatctcaccaaggtaagaatggaaaatgccaaggaatatctaaagaacccggagctgagtgtaaaagagatatgtgccatgtcaggatacggtgaccccaattattttagcagaatctttaaaaagtacataggagttacccccagcgagtatagagagaggttaggctaatgaagaaggaaaagaaaatgatagggctgttcttgctgctgggcatctgtgcggccctgaccggatgcggaagccaagagaagaaggaggagcccgccccacaggaggataaggtaaagataggcctttgttttgacacctttgtactggaacggtggatacgggaccgggatgtgtttgagacaaccgcaaaaattcagggagcagaggtcaatgttcagaatgccaacggggatgtggagcagcagatttcccaaatccgttactttatcaagaagagaatggatgtaatcactataatcgcagtggacggcagcagtctgacagaggtagtgagggaggcaaaggaagcaggaatcaaggtgattgcctatgacaggctgatccggaatgcggatgtggatctgtatatttcttttgacaatgaacaggtgggaaggctcatgggggaggccctgaaagaaagactaccggaagggggcaatatatttgccattaaggggccgccgacggataacaatgtcagtcaggtagaaaaaggattttcggaggcaataaaggacagcgggctgaatgtggtctaccagcagtactgtgacgcatggaccgcggagctggcctacgatgcggtcagcagaggactggaggcttacccggatgtggcgggcatcatgtgcggcaacgacgggctggccacagaggcggtgagggcactcacagagaaccgtctggcgggcaccgtagtagtcaccggacaggatgcggatctgaatgcctgtcagaggattgtagagggaacgcaggctatgaccgtgtataaaccggtggaaaacgaggcagcgacagcagctgagtatgcggtaaagatgggaaacgacatttacgtcagcgttgcaggaaccataagcgacggaacctacgatgttccgtatatcagtctggatcccattgcggttacaaaagataatatgcagacccagatcattgacacgaactttcattcagaggaagaggtctatctgaacattagaaaagaatagcacatagcatttttttaccacaaaaatgtcctgttgacacgggacatttttttattatggcaataaagtgcaggatgtcgtaaaaaagtcctgtagatcctgtgatatagtttagacataacaaaaaacaaatacatttgggaggtaagtaaagaatgaaaaagagagtagtcagtattttattatcaaccatggtagtcgcaggactatttgcaggctgtggaacttcaggcgatgacagttcaagcgcaagctcctctgatacaaaaactgaggcacctgctgaagataaggcagatgacgccaaagaggcttctgatacggcaacggccggtggaaacgtagtaggtgtggtaatgcccacaaaggatctccagcgctggaaccaggacggacagaatatggagcagcagctgaaggacgcagggtacgaagtagatattcagtactccaacaacgacattgccactcaggtatctcagattgaaaccatgatatccaatggcgtaaatgttctggtaattgcctccattgacggagaatccctgggcactccgctggaaaaggcaaaagaagcaggcattcctgtaatttcctatgaccgtttgattatgaactccgatgcaatctcttattatgcaacctttgacaactacatggtaggccagaaacagggcgagtacattaaggaagcgctggatctggaaaatgcagagggaccgtttaatctggaaatcgtaaccggcgacccgggagacaacaatgcacagttcttctacggcggagctatggatgtgctccagccttacattgactccggcaaattagtagtaccttccggacagattgaattcgcaaaggttgctaccgccgactggtccacagagaaagcacagaaccgtatggatacgattatctccggcaattactctgacggaacaaacctggacgcagttctctgctctaacgactccacttctctgggcgtacagaatgctctggcatcctcctacaccggagaatatccggttatcaccggacaggactgtgatgttgccaatgtgaagaacttaatcgcaggaaagcagtctatggatatctttaaggatacccgtgacctggcaaaccagacagttaagatggtagatgctattatgcagggcaaagaagcagaagtaaacgatacagaatcctatgacaacggcacaggcgttatcccgacctatctttgcgagccaaaggtttgtacagctgataactacaaagaactgctgattgattccggatactatacagaagaagatttgaaataaacattacttcaggtacaggcgggcatatacccgcctgtactaaatgatagaaaaggagggagacaattggcaaagatacttttggaaatgaaaaatatcaccaagacattccctggcgtaaaggcgctggacaatgtaaacctgaaggtcgaagaaggcgagatccatgcgctggttggtgaaaacggagcggggaaatccactctgatgaatgtattaagcggtatttatccccatggatcctatgagggcgacattatctatgatggggaagtatgcaaattcagtaaaattaaagacagtgaatcaaaaggaatcgtaattattcatcaggaactggctctgatcccatatatgactatcggagaaaatatgtacctggggaatgaaaaagggaaaaaagccgccatagactggaacgaaacgtatggagaagctgacaaatatctgaggacggtaggtttgcaggagtcctccagaacactgatcaaggatatcggtgtgggcaaacagcagctggtagaaattgcaaaagcactggcaaaaaaggcaaggctgctgatactggatgaacctacggcttccctgaatgaagccgactcaaaagcccttctggacttaatgctgaagtttaagaaggaaggcatgacttcgattataatctctcataaattaaatgagattgcatatgtggcagataaaatcaccgtcatccgtgacggaagtaccattgaaactctggacaaaagcaaggacgatatttctgaggaccgtatcattaagggtatggtaggaagggagatgaccgacaggttccccaagcgggagaatacagtaaaaccggaggttcttctggaagtaaaagactggaccgtacaccatcctctttattctgaacggaaggtatgtgacggtgtatctatgaaagtacataagggagaagtggtggggatcgccggtcttatgggggcgggcaggacagaactcggtatgagcgtgttcggtaaaagctacggctcccagatcagcggacagctcttcctaaacggagaggaagtccatctgaacaatgtccgccaggccataggcaagaaactggcctatgtcacagaggacagaaaaggaaacggtctgatcctttcgaatcccatcaaaattaatacaacccttgccaacctgaaggcagtcagcagtcacggggtaattgaccgggataaggaatatcaggcggcagtggagtacaaagagaagctgaatacaaaatgtcctacggtagagcagaatgtgggcaacttaagcggaggaaatcagcagaaggtactgctggccaagtggatgtttgcacagccggatgtcctgatcctggatgagcctaccaggggaatcgacgtgggggctaagtatgagatttactgtatcattaacgatctggtggcggcgggtaagtctgtaatcatgatttcctctgagctgccggaggtactggggatgtcggaccgcatctacgttatgaacgaaggcaagatggtgggagagctgcggcgggaagaggcgtcccaggaggtcattatggcccgcatcttgaaatcaagcaaaggagagtagacaatggataaagcaaaagtttcagaagttgtaaaaaaatataccatggtaattgctttaatactggtaacactgttttttacctggaaaaccgggggaaagatgctgcttccccagaatgtgacgaacctgatagcacagaatgcctatgtattcatccttgcaaccggtatgctgctgtgcattctcacaggaggaaacatcgatctgtctgtgggatccgtggtgtgctttgtgggagcagtgggcggctctttgatggttaacaaacacgtaaacacgtatctggcgattctcatcatgctgggcgtgggccttttaatcggagcgtggcagggattctggatcgcttacgtccgaataccccctttcattgtgacactggcggggatgctcatcttccggggactgtccaacgttgtgctggacggactgaccattgcacctatgccggataactatctggaattgttcaacaattatgtggtaaacccattgggaggaaatgggattaaccttacctgtatgctggcaggggttctggcctgcgtgatctatctggtggttgtatttaacggaagacggggcagaacgaaaaaaggatatgagacagaacctatggcaggcgttgtggttaagtctgtaattatatgtgcagttatctttgcatttatgttccgactggcacagtacaagggaattcccaatgtacttgtgtgggtgctggtggtaattctggtgtacgcgtatattacctctaagactaccatcggccgttacttttatgcggtgggaggtaatgaaaaagccaccaaactctccggaattaacacagacaatgtatactttatggcatacctgaatatgggattcctgtctgccatggcagctctggtaaccattgcccgcctgaattcagcgaatcctacggcaggtaccaactatgagatggatgccatcggttcctgcttcatcggcggagcctccgcatacggaggaaccggaacagtacccggggtcatcatcggagcaaccctgatgggcgtaattaacctgggtatgaatatcatgggagtggattccaactaccaaaaggtggtaaaagggcttgtgcttctggcagcggttatctttgacgtagtcagcaagaaaaagtcacagtaaatatagagtgaacggacgtacggctgttgccgtatggagtcagagacaaaaaatgccggcattgcagcagcgcgaaaggaggtagaactgcagccggtgtttttttatagcataagcagaaaggagaaaatatgggaaggactattagaaatgtatttttgggtattatcgcagccgcgggtacggcaatcgccgtaccgtctctgacggtggaggcggccaatccgcttttgcccctggatgagtatatcccggatgttgaggcaaaagtattcacaaatgagaagggggaggaacggctctatctgtatggctctcatgacgattatgattccggaacctggtgctcttaccagtacagagtctggtctgctcctctggaggatctggaggactggacggatcacggggtttcctttgcctcaagaaagggagaggggtatctctgggagggacaggacactgacggtgtggactggagcgacacacagctctacgccccggatgtgtgcaaaatcggtgatacctattatctggttacctgcaatgccgggggacccgcgctggggatggcaacaagcaagaacccggaggggccgttcagtcctgccaaaaaaatactgtacgatgacggtaccgagaccagcaatatcgatcccagcctttataccgaaggtgagggagagaatcagaaggtctatcttgtctggggacagacaacttcattcggcgggcagggactgctgggggcagaactgatcaaagatgagaatggtctgtataccgtagtgaaaaaggatacccagaaggtgctgtttggagcgggcaatgacggctttggatactatgaggggccgtccctgaagaaaataaacgggaaatattacattctttatccttccaacaaaggcaaaggagtacacatgatgtcctatgccatagcagatgagcctctcggcccatatacattcggaggaaatattctggataatgacggctgcgatctggcagggggcaataaccacggctccttctgcaaaattaaggatcagtggtacctcttctaccacaggggctttggcaacagcaatatgaggcgaaaggtctgtgcggaaaaaatctattttgatgaaaatggaaaaattggggatatcaatggaaatatggtacagatgaccaaccatggcctgggcggccctctgagcccttatgaaaaagtagaggctgcctatgccacccacgtgagaatggacggctatccctctggctgctatctctctgaacaggcagcggatctgcatcctctggtaaatattacggacgggaactgtgtggaatacagagactttgactttggcaccatagatcaggagctccagttcaccgcgcggttaaaggctaagtctgggggaagcatagatattgtactggatgatcccgaaaatgcgcctataggtaccgtgatcgtaggctctctggcttcctccgaatggacagagttcacggcccctgtctccaaagtccagggaattcataccgtctacctgaaattccacagtcagagcagtgaaaagatctgtgagatggaatccttccggttctctgagagaaatgcaatgttttcagagacatttgacggagatttaagagcctggaaaaataaagcaaattccagaataatcggcgggtcacttcagctaataaacaatactaatatgacagcccgagatggaattgactggaaaaactatagttttgaagcaaatgtgaaactggaagatcaggcagcggggctgacctttagaaaatcagatgataagaactattatctcctgttaatgggagagaacggtctggaactgaaaaagtcagttcatgggacggaaaccacagttggcagtatggaacaggccatagaaccgggtcagtataccagagtaaagatagaatgctgcaaggagtggattaccgtatatgtgaacggagctaagaaaggcgaattccgtgatcattctctgcagtcaggtacaataggattctatcagcctgagggaagtatggcctcttatgacgatgttgcagtcatggataccatctcaagagtagacaaaatagagatcaacggtatgcctttaaaggaattcaccggagatgtaaaaacatattccgtgccggcagacggcagcggggcagttccttttgtgaaagcttactctacagctgccaaagtcagcgtggaacaggcccaaggggtgcccggagctgccaaagtgacgtttgacgacggggaggatacctcagagtatgaaattaagttttacaccagtgacgagatacaaagtgatgattttacccgggacagcgttggagagttctggcagatagtaaatccgaatgaggccaatgttacatatgagcagaacaagggactgaccatacagacggaaggcggggatctgggaaatcagtccaaccctgcaaagaatctgtttctgcagaacgcaaacagtgactggaccatagaaacggtactaagtgccaatcccgcctttgatctcatcggcggaaactggccttcagccggcctggtagcctatggggacgattcccattatgtgaagctggtataccttcctaacggcgtagaattaaatactggtgacggggacaagcagcagataggcgttacattaacggatcccaatcaaaaattaagattgaaattagagaagtcaggcaatacctacacgggatactatgccctgggggagaccggggaatataaaaccttcagcagcaggcgcagtatgagcgctgaccatgtaaaagcaggcttaatgaccaccggattcatggcttccggaaatcagacaaaggtcaccttctataactttacagccaccaacggcagttcatcagttctgccggaactgataccggcagaaggggttgcagcagatcagagtgttatagaactgaccacgggggataccgtctcactaaacgcatctgtcgcacctcagaatgctacttataaggatgtggtatggagtattacagaaggcgcagatgctgtggaaatcgtaaatgatgttaagtcagataccattgtgctgaaaggagtcagagaagggaatgcagtagtgaggctgtctctgcaggataaccctgatatttacgcggattgcgaactacatgtccaatccccggcattagattctctgacggtaaccccgccttccagaacggaatataaactgggcgaggatctggatctccatggtcttgccatagtggcaaactatgtaaacggaaccagtgcagaagtagatcctggggactgtgagattaccggatttgattctttaacaccgggagaacaaaccgttgccgttgcctatacagaaaacggaattaccaaaacaggagaatttacagttacagttctaaatgaaaaggcgctgacagggattcttgtaacgcctccggccaagacggagtacgaagagtgtgaaccctttgaccgtacgggtatggtggttaaggcacagttctcagacggcacggaggaagaggtgtctgagtacgtgttatctgatgtgaataccatgactgcaggaacaaaagaagtcacggtaacctatgaggacaaggcggcagccttcacaatcacggtaaaggaaagaatactctcaggcattgagattattgtgccggacaagacggattacctggtaggagaagcatttgaccctgcaggaatgatcgttaatgcagtttacagcaatcaggtgaaagaagaaatcagccagggggcttacactctggaagggtttgactcaacagaggccggagacaagacggtggttgtgtcgtatgagggatatactgcggaattcgcagtaaaagtatcagaaaagccagaggagccggtattggcaaagctggttctcacaccgcccgccaagaccgaatatcttgtgggagaggacgaggatcttacaggtcttgctgtctacgcctggtattcagacggggcctgcatagaactggaaagcggaagctatgaagtgagcgcacttgatacgtcagcagccggtattcagtacattacagtatcttatgagggtatgacggaggaattcatgattgtagtgtcagaggacacacaggcagagattccccactgggaacatgaccggaacggctggtggtacagcaacggagatggcacctggccgaaattgtgctggaagtctatccatgatacctggtattattttgataagtacgggtaccgtatgacaggctgggtgaatgacggaagccactggtattactgcaatgaagacggagcgatgcagactggctggttccgggaggggaatacctggtattatctgagaaatagcggagccatggccacaggctggctgctggagggaaatacctggtattacctgaagggaaacggagcaatgcagactggctggttccgggaggggaatatctggtattacctgagaaataacggagccatggccacagggtggctgctggacggaaagacctggtattatctaaagagcagcggggcgatggcaaccggatgggttctggacagaggcacctggtattatctgaagaacagcggagccatggcgaccggctgggtacagaccggcggcagatggtactatctgaagtccggcggtggaatggccacaaaccaatggattgggaaatactatgtgaataaaaacggggtctggacaaaaaccagataattgaaacaggcggacagatcggtggaacttccggcagatctgagagcaaggcaatcgggatgaaattacgattcccgattgcctatttgtagtcaaataatacaccttaattcgttaaaaaaactggattattttacgattaaaaggacaaaaatgtgctattgacaatgtgaatgtataattatgcacaaaataatgcagtaaatagcaaaattgtcctataactttagtggtatatatatagtacagcagtaatgaagtaaagtaacccattaatcaaatttaatgtaagaggtgaaaagatgaagaaaaaaggactgcaaaaatgtatggttgcaactttatctcttggggcaatgctgggtatgagcgctgtggccgttcatgccgagaaccctattgtacagacctactatacggcggatccatcacctatggtagatggtgacactctgtatctgtacacgtcccatgatgaagacggcccaaactcgttttatgaaatgaaggactataagtgcttttctaccacagatatggtgaactggacttaccggggaactccggcagggattcagaccttttctgcctggtccgatcttggaaaggacggagccgcatgggctcagcaggtagtaaagagggacggaaagtattacttatatgcacctattcgaattaaaggcaaagcatggggaatcggagttgcagtatccgacagtcccaccggaccttttaaggatgcgctgggaacctatttgattgatgcgggatgggaaggaatcgatcctaccgtatatgtggacgacgatggacaggcctatctttactggggtaacccaaatctccactatgtaaaattaaatgaagacatgatttcttatgacatggagtatggcattcacacactggacatgacaacagatgcgttcggtgagggagacggtaaggctgcatatcaggaaggtccgtggttttataagagaaataataaatattatatggtataccctgcaatagcaggcggcggggaattcatggcgtattcaaccagcgacggccctaccggtccgtggaaatatggcggagagattatgaacagtgacggcctgaacagctataccattcatccgggagtagctgatttcaaaggacattcctatctgttctaccacactggctggctgcccggaggcggaagctttacacgttccgtgtgtgtggaggaatttaagtacaacgaggatggaacaatcccatttatggacaagaccagggaaggcgtagaagcagtagaaaatctggatccctataagctgacagaggcggaaaccatggccagtcaaaaaggtatccgcccattggaatgtgaagacggaagaatcgcggttaagaacattcaggacggagactatgtaaaagtgaataatgtagacttcggtgaaaagggtgctgccatgttcacagccggcgtagcctgcggtgctgagtctatggaacaaaaaggcggtaacattgaaatccgtttagacagtgaggatggaaaattagtaggtactctccccgtttcttacacaggcggatgggatgtatggcaggataaagcaaccaacgtgacaggagccgagggcgttcatgacgtatattttgtatatactggagatcacgagggtgaactgttccaggtagataactggaagtttaccgaaaaaggcgaggcccgtgagcttgcagccctgaatgcatctgtagacgtatataagctttccgatacagcagaaggagcagcaggcaagtacaacaagacagcgctgacagtcaaggcaatttattcagacggcagcagcgaggatgtaaccgatcaggtagaattcaccatggatccggaaggtatagtggaattgaatggcgcagaggtatccggtaaaacgataggtgagactatgataaccgccagctatcagggaaaagaggataaggtgctggtaaaagtagttgatattgaagaggaatacggggtagaaagcttaactctgtcttccgaatccgtcaatgtacgtgtaaatgaagcgataacggtaacagctacagcatcctataaaaacggacgtacagaggatgtgtctaataagctgcagtacagcaacatcagtgatcctgaagttctggaagtaaaagacggtaaactttttgcaaagggtgtcggtcagtctacggtagagctgtcttacgccggagagataggggcagcggcaacggctgcgctagaggtaaacgtaactgtcgtaaatccatatgcccgtgtggaagcagaagactttacggataaacatggctccgtacgcatagagaagtgtgaagatgaaggcggcggcagtaacattggaactattgtagaggaagactgggtaaaatacagtggcataagctttgacaagggcacatcaaaaatgatgtttagattggcatccctctggggattccccaagtatatgcagttaaagctggataccctggagtcagatcctgtagcagaatttgaacttaccagaggtaccggtggatggcagaattacgaaacctttgagtgggatgtaccgaatattactggtgtccatgacatttacttatatttcccatcaagagatatgaacattaactggtggcagtttgtagaagaaaagaatccggatcaggaagctgctgacggcgtaaaagcgctgatagaggctatcggcactgtagagtatactccggaatgcaaagcaaagattgatgctgcccgggaggcatatgaagcgctgacagatgagcagaaggcactggtagataacttcagcaaactggaagaagcagaaaacacatatcaagtgctggaaacagcagcagataagaaaggccttgaactggcaattgccatggcagagaacctgaaagagggcagccagtcattcatcggcggcagctgggaagcagtagaaaaagctctggataaagcaaaagaaattatggcgaaagaggacgcgactcagttagagatcgatactgccttcgcagaacttctcaatgcatgtacgaacttaactcccggtgtggaaaaggccggacttgaagctgctataaaaggagcgcaggagctgcttgcagatgagaccttagggacccgctatacaaaagagagtatacagatagtgaaagatgctctgagccatgcggaaacagtattcggaactacttatgatgatgcaaaagctggtcagaatgcagtaaatgatgctacattaaacctgattactgctgtaacccagatgatggagaaggatctgtcccgtgtggatgccctgatccgtctggcagaagagattctgaagggtgaagataagtatacaagcacttccgtacaggaattaaaggcagcgatagaagcagccagaaccgtttctgaaaatccggatgcaagtgcagaggacattaaggatgcggcattcaatcttcagaaagctatgacaagtcttaaatggagaggtaacaaagcagaactgaaggcagtgattgaaaaagcagacgcaatcttgaaagactcctataaatatctcacatccagtttagaaaatctttctgatgttctggaagaagcaaggggagtttacaatgacccggatgctgtacagacagatataaacagtgtgctgaagaaactgattgctgagtgtatggaagcaaggctgcttggcgatattaaccaggacaacagtgtagatgctgcggatgcttctctgctccttcagtatacttctgagctgattgagctggatgagatgcaggaacagtacgcagatgtgaaccagaatggcgtatcagatgcagaagatgcttcttatatcctgcagttatcagcagaattaattgatactttttagctaaggcagggtacagccacacagagaatattctctgtgtggctgactgagtatctgcaatcattaaaaaggcagggataaatatgactaagaaaaataagaaatggattggtttatgcatttgcctgatatgggcagctcagagcatgccggtactggcagcatccgggcctaaaatcagtatgcaggcaggacctgtaaaagaaaaggatactcaggtacaggtatcctgtgaaatcgaagacggcattgatgttacaagcggtaaactccgttttctgtacgacgcttcacagcttacgctgcacagtgacaatgtgggggcagctcttcagagcgggctgtgtaaaattaacgatcccctgaccggaaataaagaggaaggcgagattgtggcatcttttgcactgtctgagcctatcccggaagacggaagtctggttgatatgacctttgagttaaatgataatgtaaaggctggagatcagttagaaatctctctctccgtggaacagctctcaggaaataacggtaatatcagcgccgaagcaattcctctttctgttcaaatagaggcaggcggccatacgcctggccctccggaagaaaatcaggaggagaaaaaggaacctgagcagaagacgcctccaaagaaggaaccggctacgcccaaagataacacaaaatcttcagacaatagcagcaaaacaaaaagtaaagcagctaaaaccggtgatctcttaaatccctggctgtacatcgttggattgggggctgcaggtgccgggattgcggctgtaaaaggaaagagaacaaaaaaacagggcaaatagctgttgtccgggaaggaagaggttaaagatgaagagtaaacggttgaataagcatattgccggagctttctctcttggattggtattgagcctgagttcagcatccgtcagtgcagacagttccggcatacagggatatgacactgcggtgtcttcggctctatctggtgatgtctccggggacagccctgcatatgccgatcctgcgggcagcaaagaccaggttctggcagacaaaaagggattggagcttgctgtttctatggctgaagaactgaaaaacggcggccagtcctttttggaagagggatggctggcagtggacatagctttggaaaaggcaaaggcagtgctggatgacgaagatgcaactcagatagagataaacgaggcatatacgcaattggtgagtgcctgtgcggacttaattccaggggtagaaaaggaagggctgaaatctgccatagacagtgcaagagaaatcttagaagatgaggaaaccatccggctttatacccaggaaagtgtacaggcggcaaaggatgcactggctgaggcggaaagggtatataatacagaatatgcagttccggatcaggggcagcaggctgtaaatgatgccacatccaagctaatcactgcagttaacaatatgttagaggcagagcagggcaagtgggtacaggatgaacatgggtggagatattacaatcaggatggaaagtttacagtaaataactggcagtatatagatggaagctggtattattttaatggaggaggatatcgggtgacaggatggctccagctgggaaatacctggtactatctgtataaagacggtactatggcaacgggctggctgctggaaggaaagacctggtattacttaaaggacagcggcgtaatggcgacgggctgggtgttagacggcaatacctggtactatctgaaaggcagcggagcgatggcaacaggctggattcagttagggaatacctggtattatctaaaaggaaatggagccatggcaacgggctggctgcattatgcaaatacctggtattacctgaaggacagcggagcgatggcgacgggctgggtgttagacggcaatacctggtactatctgaaaggcagcggagcgatggcaacaggctggattcagctgggaagtacctggtattatctgaaaggcagcggagctatggcgacaggctggattcagctgggaagtacctggtattatctgaaggccagcggagcgatggcgacaggctgggtgttagacggaaaaacctggtactacctgaaaagcagcggagcaatggcaacagattggttattggatggaaagacctggtattatctaaaaggaaacggagcgatggcaacgggttggataaaagtcagaggtgtctggtactattgcagctccagcggagccatgcagacgggctggctgctggacggaaagacttggtactacctgaaagacaacggggctatggctgccaacacatggataggaagatactatgtaaacggttccggtgcctgggtaaaaacaagataaatttgtaaaaacagaatcattataataaaacaggagattacccgactgaaatcggtgaatctcctgttttgctgcagagaaaaaatgacttatcagtatgcatatggtaaaatacagacagaatatgcaaatttttgtgagaaaggaagaacaaaaatatggaagtattttaccgcctctgcgtcagtgtgtccattggagttatcgtaggctttctggtgggaggcattaagttttctttaagaaaaaagtataccgataaacagattcagaaaaaccgcagagtaatgaataagatatcctctgtactaaaatacagcacccttcttctgctggtgctggggtttatctggtgtgtttactatttggtattaggagccacagaccgggggcaggctgactatgccaataatatgtcagagaatattgtagctgtcctgaccgtaatatcaattatctttgcattttttgagtttttgagacatacaggagataaatagaggggattcacccctccaggtatctccttttacggatgacaggatactgtgcaatcagtttttgataacaatcgcaggactcctcatgatcatttatcatcccgcaggcctgaagatgagaatataccgtaacagaaccgagatacttgaatccccgttttttcagatctttgctgatgagatcggaaagtccgttcctggcagggatgtttcctttctgatgtcctgcataaagtatggtcttccctttggaataatcccacagataccggctgaagctgccgaactcgtcctgtattttcaggaaacaccgggcattgtggatcacagcttctattttacggcgtgattttatcattccttcggtattcataatacgttctatatctgcttctgcaaaaccggcgaagcactgcctgaagatttcccgtttccggatcatcatattccagttcagcccgcactgcatgacttccatcattaagaactcaaactgcttctggtcatcatgtacgggaatcccccactcctggtcgtggtactggatcattggctcattgatgagacaccatggacaacgtttcatatcgtatattttattcctttcctattgctgtgcccctgtatctggctgggaaagaataaggattattatattctccgtgaatataccgtattcttctgattacttataagcaaaatgataccctcaaagatatattccgtcaagtttattctcagggacttactggagtgatgccaaaggctcaggacacagacataatagatattattgttatttcatatataaaaaagaggaaaacaacccggtgtatggtataattttataaaggtaaagagcagtgttacccatagaatttactttaaggaggaaatgaatatgtattattctacgaattacgattctcccctgggacagattactttggcaagtgatggagagcatcttgtgggtgtgtggatagaaggccagaaatatttttgcggctcagtaaaagaagaactgcttccaaaagacgatctcccggagtttgaagccgcaataaactggctgaaccgatactttgccggggaaaaaccgcagataaatgagctgcccctggcgcctataggcggtgagttcagacaggaggtatggaaactgctctgtgagattccttacggagaagtgaccacgtacggggaaatcgcaaggaaagcagcagagaagctgggcaatcagaagatgtccgcccaggcagtgggaggggcggtgggacataacccaatctctattatcatcccatgccaccgtgtagtgggggcaaatggaagtctcaccggctatgggggaggcattcagaaaaaggtgtggcttttgtcccatgagggggcagatatgaaaaagtttactattcccacccaaggcactgctttgtgacaggtacagcagtttaggagcggaaaccggcaggtttccgctcctatttgctataaaaaatggaaaatttcctgcaaatataagagttttttaaatattaacaggaattattccattcatgcagcacaaatacaattgacaagtgaaatgtcatgacattataatgaagtaacaaaagatgcgatgtgcagattagcgaaaggagaataaaatgaatacatggttctcagagtggaagcattcaatccgggggaggctgctggcgcattttaccgttcttttcctgctagtcattggcagcatggtagttttttaccacatctctattaatatcacctatgatacagccacggaatctgtgaagaataccatacgccaggtgaatacagataccaaccgggttttgagcaatgcgctggaccaggccaagcaggtggccagagacgcagagatacaggcaaccctgcgaaagcccctgccggaaacagagcagaccctgtataagcagagggtccagtacaactatatcctttatgacagaaaccgctttgtggatgacatcaacggcatctttgtcctcggagacaacggcgccatctaccgttccaccaggtatgggctgcgggaaaaagaatttttagacaaggactggtacaaaaaagtaatggagaccggtgaggtgttatggatgcctccacactttggatcgaacattgtaaataatctggatgactctaccattagtgtggtggtgcccattaaagaccgtgcatccaccagaatattgggagttgtagtggtagacatactgacggaagagctggagcaggtgaaggacagcggattagtctttaagggaactacctacatactggatgaaaagaataaaatcatctacaccaatgccaatgagagcgccagggagacagaggcaatcagcagagccgtggccgaaagcgcattgtcttcaaactcctggacaaaggatatccgcatcgacggggacaagtatctggtgtctgtggctgaactctcagacagcggctggaaagtcatgggtcttatctcttatgaggagatgtatgcaaaagtcagagtgctgcgcaattctatttttatcgtaattggtgtattcgcaattatagcaattgcattcgcggtaatcggttctaaccaggtctctaagcccatccgggagatccgcaccaccatgaaagaagtggaaaagggaaatttcagcgtgcgtgtggaatacggtgggaaggacgaggtgggagagctggttcacagtttcaaccacatggtacttaagatcaatcagctgattgagcgggagcaggaaaaccagaagaaactgaaccaggcggagtttaaggcgctgcagtcgcagatcaacccgcactttctatacaataccctggattccatcatctggatggtcaggatgaaccgcctggaaaagttagaagagatgattacctccctgactaatttcctgcgcatcggattaagccgggggcgcagcgagattaccctggaagaggagctcaaacatgtgggaaattatgtggcaattcagaaaatacgctacgctaagctgctgagttatgaggtggacgtgccggaggacttgaaaaagtactatgttattaaaatgattctccagcccattgtggagaatgccctttatcacggaattaaagaaaagggagtgccggggctcatccgggtaagcatggaagccacagaagaagagattttaatcacagtcacagacaatggcatgggcatgaagccggagaagctcagggagatagagaatatgatggagaaggggattgactttgatcccaatgcttacggagtcatcaatgtgcagagaaggatccagacaacctacggaagcaggtacggactgcattttgagagcgaatatacaatggggacccgggtctacgtgacactgccgaagaaaggagagggagaatttgctgaaggtaatcatagttgaggacgaggatctgctgagggatgggctgtcaacctgtgtgaattgggaaaagcttgggtgcgaattggcaggcgctgctgaggatggaatcaaagcgctggcccttatggaaaaggttagtccggatgtagtgattacagacatcaagatgccccacatggacgggatagagctttcggagcaaataagggaaaagtatccccggattaaaatcgttatcatcagcggttatgatgaattcgagtacgccagaagggcgctgaaagcgggagtgtccgaatatatcctgaaacctgtgaacctggaacagctggacacagtgatgaaatccattacagagaccattttagcagaacgggagaaagaaagagagatcctgaaactgaaggacatgagccagcagggattgggaaccatacgtcagactttgttttcaaaaatccttctgaggaagcagagtccggaagagcttggggacctggtttcccagatcggcgagcatgtaaacggaaagtattattcggtgggcatcctggagcagcaaaatttccccatcgtatccattgactgcgactatctggaaatcattgaaatggacagagcctttgaacagatggtaaacaggtgtttacaggactatgaggtgactgaggagggaaatcatgtggagatcctgcgctccagtaactgtgaacggctattctgcatcgtacataactctgcacaggaagtcaagaaaatcataaaagacatcagcagtctctttgatgtcaagagagatgacatggagcatctgcagctgacctttggctgtgtttccagggagctgaccggcctgtacaaatctttcctgaatgcaaggggcagctgtgagaagaaatttctggagaattggtcgcagattcttcatacagacggcaaagcaagcagcaccatacagcatatgaattatgatgcccagtccctgttcttcgaggtgagaagcgggactggggaaggaattgcaagctgcctggaggagttccgggaaagtctttccagggagaagattgtatcctatatgcagattgtgatgattgtaagcaacctgtattttgagttaattaaacttccggaggaggtgggggctaacatacaggatattatcggggatcctatggaagcctttcaccgcattattgagaaacgaaagcgtcacgagatgatagaagagatagggaaagtctgtgcacagatacacgaatatttcggcagtgtctccggcgcaaaaatgcagggggtgttaaagcgaattttagaatatatagatacccattacatggaggaggatctggctatgaaggatgccgcagattatgcctatatcagcgtgtcttatctaagtcttatcttaaagaaggagataggcaagacattcatagagtatctgacagaagtaagaattgagaaggctaagaattgcctgctccatacgaatatgaaaaattatgaagtggcaaacgcctgcggatattcaactcccgcgtacttcagcacggtttttaaaggcgtctgcggggtaagcccgtcggcctttcgaaaagagaaccaaaccctttcatgaattttgaaagaaaattatgaaatattggattcatcttttgttcacatttcattatacttaccatatcaaaaaattccaaggaggaagagactatgaggaagaaagctttgagtctggtactagcaatcactatggggttagcccttgctgcatgcggaggagaaaaagacgaggcacctgctgccgctgccgaggcgccggcaaaagatgacaaggaagcagcagaaccccagagctccggtgaagttgacatgagcgtactggagggcaagacgattggattctcacagtgtgataatggaaatagctggagaattgccgagactgaatctatgcaggcagcagctaaaaagtatggtgtaaatcttatttacacagatgcttccgctgacatagcaaaacaggcatcggatattgaggatatggttgcacagggtgccgactatttgattattgcaccccaggaagaagacggtcttcaggcagcgcttcagtctgctatggacaaagatgttccggttattctggttgaccgttccgtaaacggagaagcaggccagttatacacaagccagatcatgtccgactttgtatgggaggcagagcagtgcgcaaaaattatttctgagaccttaggagggaaaggcaatatcgcaatccttcagggaacacagggagcaacttcaacaaatgaccgtcagaaaggctttatggacgcaattgaaggtaccgacttgaaggtagtggctgaccaggttgccaactatgtaatggatgaggctcaggacgttatggccaatatccttcaggcacagggcgatgagattgacgctgtatactgtcacaatgacgatatggcccagggcgcaatcgccgccattaaagcggcaggctatacaccaggaaaagacatctatgttgtaggtattgacggaccaaaggctgccatggaatctatccttgcaggagagcagctggcatcctgttcctgttcccctctgttcggcgagccggcatttgaactctgtgcaaaaattgaaagcggacagaaagttgacgcttcttatacaaatgaagatacactgtatacgaaggacaatgccagtgtagacgctggattctaaagaatgctaaaaaacagtatgctgttacaaaaggcagatactaaatagtgtaacgaccattctgtctatatttcaaaaaagtataaatggaatggtcgtttctatgattggagagaagttatggctaggaataagatgttgttagagatgcgggggatcgtaaagaatttccccggggttcgggccctgaagggggtggacttctctgtggcagaaggggaagtccacgcactgatgggggagaacggtgccgggaaatctacgttgattaagacacttaccgggatctatcagagagacgaggggagcatcaccttcgacggaaaagagcttaatcctaagactgcactggaagcgcagaatgcaggcatcagtacaatttatcaggaattaaaccttgtaccgtttcaaacagtgtatgagaacatgtatcttggaagagaaccaagaaccaaagcaggggtcattgaccgtaaagcaatgatcacaggctgtgaacaggtgctggcggatttgggaatccatatcaatgttaccgcccccctttctacatatggcacggctgtccagcagatggttgctattggccgggcaatttcagtaaatgcaaagttagtgattatggatgagcccacttcttccctggataccaaagaagtgcgggtattgtttgatattataaagaaattaaaggcaaaaaatattgccgttatatttataagccatcgcctggatgaaatttttgaaatctgtgaacatgtgacaatactcaaggatggcgctctgtcaggggaagtagacatcagggagatcgatcagctcagactgattaatctcatgattggcaaagaagcaaaacagctggagcgaaccaagaagggatacacccttgagaatgccgaaaccctggttgagatgaaggacatccgtcagggaacccgactgaacgggcttgggattaccattaaaaagggagaagtcttaggactggccggactgcttggctccgggcgcacggaactcggaaaagtgttatttggggcgacgcagccggatgaaggagaaatcttctggatgggccaggagcagaaatttaaaaatcccaaagacgccataggacttgggatgggattctgcacagaggacaggaaggtggaaggaattatcccccatctgtccgtgcgtgagaatatgaccattgctcttcttcctcagatcagcaagatgggcattgtatctgccgctaagcagagacaaatcgtagacgagtatatcaagcgcctggcaatcaagacgcctacacagaaccagcccatcaggaatttgagcgggggcaatcagcagaaggtactcctggcaagatggctctgcatgaatcctaagctggtgattatggatgaacccacccgaggcattgatgtgggcgcaaaagcagagatagaagcactgattctggagcttgcctcacagggaatcagcattcttatgatttcctctgagattgctgagctggagcgtaactgtgaccgggtagtagttatgcgtgaagggcgcaagctgggtgagctcataggggatgatatccatcaggataaggtgatggagattatcgccagcggcggcggggaattagagaacattggaggtgcagcaaatgagtaatacagtcagaaccaaagcagatacagttgcaactttgaaaaaatacagtgctgtcattctcctgttggttttccttgtaataaatgcagtgattacacccaactttttcagcatgggaacagtccgtaacattattatccagtcctgtaccattattctcacaggaatggggatgaccatggtcatttctacaggaggaattgatatttccgtaggtgcagtgatggccctggcaggtatagtaacagtcaagctgcttccctatggggtgctggcagcctgtatagcagcaatcttcgtgggcgccctctcaggtgcgattgccggctttatggtaggaaagctacgtgtccaggcaatggtagtgacactggcactgatgattggcgtcaggggcgttgcccagatattaaatgatgccaagattatctatatttcaggtgataatgcagattcctttaagatgctgggaagtgccagcctggggggaatccccatccagattattcccattgtactggcagtggcaatcgtatggttcgtactggagaagaccattctcggccggcatattcaggcagtaggagataaccccagttcagcgcagctggcaggcattaattctacaaggacactgatgattgtttatatctccagtgctgttctggcagcgattgccggtatcttcgccacagctaagatcggtgctgctgacggaaactccctgggacttctctctgaactggatgccattgcggctgttgcggtgggcgggacatgcatgtctgggggacgagccaagatctttggaacagtgatcggtgcgctgatcatgctgctgattaccattactgttaacatgaataatattacgtatgaatatgcacaggtattgaaggccttcattattatctttgccgtatatattcagcgcgataaggctgcttaaggaggggttgaaatgaataaagcaaaaagtatatatcaatggttcagttcaaaaagctccatcgcagcatttttgattctctttgtattttcaagtattgctttttccagcaggagctttgcatcttttgattccatagccaatctgttccggaaagcggccagcgacggcggattcctggcattggggatgacgtttgtcattctgattgcccagatcgatctgtctgtaggcgcagttatggcccttggtggtgtgattatggcaatgtttggggctcagaatcctatcctgggtattgctctggggcttttagcaggtatattctgcggattcttaaatgggtttatggtagcgaagatgaggatatcctcctgggtggcaacccttgctactatgctgggggtccggggtattgtactgctgatgacaaacaaaaaaccggtgtctgtcagcaatgatgcgctgatcgctttggggaacaccaaaattttagggattaatattctggtgtatttcctggtgattgcaactttgatctgtatgcacctgtcccataatacaaagtttggcatgggcatctatgccgtgggcggcaatgaagaggcggccaagatgatggggcttaaggtagataaaattaagattctctgctatgtaatgtgtggatttttcgccgcattggcaggcatgctgctggctaacagactctataccgcacagcctactgcgggtgatacatgggagaccacggcaattgccatgtgtgctctgggcggaatcaagctctcagggggagaggggaaattcagcgggacattttttggaattctggtaattgccaccatcaatacgatatttaactttgcaggaaacctgaattcttggtggcagaatatcatcatgggaatcctggtactgatttccattggtgttcagtcggatgtgctgaagatccggaaaggcaaaaagcatacctggaaacaggaagaggctgcataaatcagaagagactgcaatgaacataagagtaaggaggaaggttggatgctagcactagtgaaatatggaacaggaccaagggagacggaacttcgggaagttccagtcccggaaataggtgatgatgacatacttattgaagtaaaagctgccggaatctgcggctcggatatcgcttacgataatggtgaccatcccaatcatctgaattgtcctgttgtcttagggcatgaattttcaggggtagttgccaaagctggtaagaatgtaaaggactggaaagtgggggctcgggtagtttcagataacaccggctatgtgtgcgggaaatgttatgcatgcagcaacggacagtttttaagctgtcccgaccgcaaagggctgggctatggcatggacggcgggtttacagactatgtgagaatcgacggggagctgcttgcgcggaatcccaacacactctttgccattccggaaaatgtaagttttgacgaggcggcaatcctggatcccatatgcaatgcgtataaagcagtgattcaggagggacggattttgcccggcgaggatattatcgtgtacggcgcaggtcctttagggttgtttgccatccaaattgccaggcttgccggatgtgccaacatcattgccgttggtctggaggcagatgaggagcggtttaagatcgctgagaagtacggggctaaccacatcattaaatcagataagcaggatgtatatgaagagataaaaaggattaccaaaggggatatggcagcggtttgtattgatgcggccggggcaaatgcggttatgaagcaggcagtccagatcgtgcgcaccggaggcagaattgtgcgcatcggttatgataaacggccatatgagcagacccttgatccctttacagacagaggagtgtcactgatcggacattttggctatgattataattcctggaagaatgtaatgcggctgttagaactggggaaagtagacgtaaagggcatgatttcccatcatatcaggctggaagactggcggaaaggatttgacctggccaggagtaagaaggctataaaaatcattatcaccaaggatgaaagtgtcctttccccattagaatagcaggaagaccagaagggaaggtggtttatgtgagctatatcgatacatataagaagtattaccaggcgattatccaggaacatgaagccgtatttgaaaaactggatatggaacagctgaaaggatttgtggatttaattgtaaaatccaacaagatatttgtccacggagctggtcgggaggggatttccctgcggggattcgccatgcggctggcccatctgggaaaacccacgtactggctcatggatgacaccaccataggaatgcatgagggggatcttctgatcatctctgacgggttcggtgatgtggggatccacaggcgtattgaggagagggcttccaagacaggcgctaaagtggcaattattacgggccttcccgaagggggcaatgtgaaaaactttgcagactttgtactttttatcccggctgccgtctatatggggaaagacagggaggatccggatgcacccaggcagcatgatgtggttcccaccatacagcccatgggtaatctctatgaacagcacttgtatctgcttatggacattgctgcaatcctgataaaagacgagatgggtttgacttacgatgatatggaagcaaaccataggaacatagaataagatatccccaggggaacaggaggagaatggatgaaccatcagctatttaccaggtggggaaaaaacctggacacagataagcctttgcaggaatacccccgtccccagatggtcagagacagttatctgaacctgaatggctactgggagtatgctataaattttgagaaaaaagcacctgtgaagtacgacgggaagattctggtccccttctctccggaggcatttctttcaggcgtgcacagacagaccaggccggatgaataccttcattataaaacgcagtttacattgccggagggatttctccgaaaacgcgttttgctccactttggggcagtggaccagatctgtgaagtgtttttaaatggcagccctgttggcagccatgaggggggctatctcccattctgcttcgatatcacagaatatctggcaaagggggccaacgaactgaccctgacggtgagagattactcggatacctcctatctctcaagggggaaacagaagctggggcggggaggcatgtggtacactgcccagagtggaatctggcagactgtctggatggaaagtgtaccagaatgctatatcgaacgggtaaagctggatccggattatgacaatggatccattggcataaaagtgttcagtacgggacgcaggggaagggacgtgaggataagaatccttgacggtgactgtgaggccgtctcggcctgtatggctgcagataagaaaaaagatataaaaataaaagactttaaaagctggtccccggaaacccctcatttataccatatggaaatcactatgggagaggactgcgtccgcacttattttgccatgcgcaagttctctgtaggaagggatgaaaaggggattctgcgttttatgctgaataacaaaccctatttccacaacgggctgctggatcagggatactggccggacggtctgtatactgcgcccacagaccaggctctccgctatgacattgtgaaaatgaaagagctgggttttaacatgatccgcaagcacattaaggtagaacctgcccggtggtattaccactgtgaccagattgggatgctggtgtggcaggatatggtaaacggcggcagtgattatcatatgaattttatctgctttatgcctaatttctggatgcctttcggacgcctggtaaaggacaataaatacagggcatttgcccgcagggagaaagccgggagagcgcagtattacagagaactgaaggccgccattgctcatctgtacaatgtgcccagcatcgctgcctgggtacccttcaacgagggatggggacagtttgatgcggcagaggcagctgccagggtcaggaagctggatgccctgcggctgatcgacgaggcaagcggctggtttgaccagggcggcggagacatgtacagtatccacaattactggagaaggctgaaggtaaaacccaagaaagaccgggtggtggcgctcacggaatacgggggatactctcagcggatagaaggtcacagcttctgcagtgaagtctacggttaccggatttaccagacaaaacaggaactgaccaaaggttacagagaattgcttgagactgacatcataaagggaataagcaaaggcttgtgcggcacggtctacacacaggtaagtgatgtggaggaagaggtgaacggacttctgacctatgaccgggacctggtaaaagtggaggaagagactgtcaaaaagctgaatcaaaaaatctatgaagaatttgagcgctgtacccatacagggcagtgagggaggaagggataggcatgagagagattcttatggaggtataccgccagataaaagaacatgtggatcaagaactgcttccgttctgggaggaacggggcgttgataccaggtacggaggatacctggtatgctgtgacagccagggtaaagtcaatgaggacgcggacaaatacattgtgacgcagaccaggatgatctgggcctactccgcatatgccagaaaatataaaaaagaggagtatctggagaaggccagacagggggtccaattcttcatccggcatttctgggatgcagagttcggcggctggttctggaagactgactgcaggggagaggttttggataaggggaaggtggtatatggacagacctttgccatctatgcactgtcggagtacaccctggccagccaagactctgtaggacttgactatgcctgccgcacctttgacttgctgcagaagttctgtacggatacggctaacggcggatactacgagaatctggaacaggatttttccctgtcggcgccaggatttgcagcaggagatttgaagtccctggatattcatatgcacactatggaggcttttaccaccctttacgaatgttcgggacaggaaatccacaggagaaagctggaagaggtcatcgatgtaatactgactaagatggtaaataccgagattggctgcggctataatcagttcgacattcattttaaccggaaaccggcgatcaatatacggaggacctggaatgcggagcgggagacgggggaagtggtggagacacctacagacaccacctcctacggccataacgtggaactggcctggcttttgaattatgcggcgaagattcttggatatgagacagaccacttcctccctatcacacataacctggtggaacatgccttacgatacggctttgactatgaacggggcggcgtctacagggacggaccccacgaaggccaggccctggtaaaggacaaggagtggtggcagaactgcgaagtgctggtgggttttttggatgcctatcagcaggagggtgatacccgttatgcccaggcatttgtaaagacctgggagtttgacaccacttatatgattaaccatggggctggggagtggaggcagctggtgagattcgacggctcccccatagagacccagctgggaaatccatggaaagggatgtatcatacagggcgggcaatgctggagacgctgctgcgcctggagagcattctgcaaatggataagtccgcagggaaagaggtggatggtataaaatgaccagagaagaaataatcagaaacatcagggagaagaaagtaattgccatcgttcggggatttcatcctaagcagtgcatacagctggcagaagctctgtatgcaggcggcatcaatatgatagaggtaacttttgatcagtcagggcctgatacctggggggaaaccgtggaagcgatccaggcgatttgggaaaacttcggcggcagagtgctgccgggagcgggaacggtgatgacggtggagcaggtagatttggcaaaaaaggccggcgccggttatattatatcaccggacgctaacccggaggtcatccgacatacccgggaggccggactggtctccctgccgggagccatgacccctacggaagctgcaggtgcacaccgggcgggtgcggacatgattaagctgtttccaatcgccaacctgggggctgcctatcttaaggcattgaaagcacccctcaagcacattgatttcatggcagttgggggcgtctccccggataatatccgggagttcatcaaagccggcgcagtgggcgccggggtgggaggcatgctgaccagaagggaacttgtggaggcaggtgagtttacaaaaataacagctttggcacggcgctatgtggaaaatgcaaacggtgtaatttagaatgagcagaggaagggaaagggggaggctaaaatgccaaagatgattcatacggtgggcggtctgctgtcggtggatgagttggggacaacactgatgcacgagcatatcctgcaggccaattggtccatgcgtatgtcctttaaagattggtttgactacgattccttcatagaatgggcatccgaagatgtaaagcgtaccagagaaatcggagtggagaccctggtggaacagaccccggtgtgcctggggcgggacatccatgcaatcagggatgtggcagagaaaaccgggatgcagatcatagccagtactggatttttctattcagaaaaccagtggatgttcctgcgctcagaggacaactttgtaaaatggctgatgaaagacatagaagagggaatacaggatacagctattaagccgggattaattaagtgcggtactgatactccgggggtaaccgacctgaaccgaatcctgctgagagcccatgcaaaggcgtcgaaactcagcggtctgcccatagcgacccacagctggtatcagaatcgaagcggaatcagccagatgcagatttttgagaaagaggggctgaatcccagaaaggtgctcatcggacactgcggggataccaacgacctctcttatctggaagaactgctgcgaatgggatgctggattgggcttgaccgtttcggagatgacgccaagaatccgctggaggaacgggtaaataccctggcagagctgtgtgaccggggctggattggacagctcatgatttcccacgattatgtaagctttgtggatctgggaacttttgagtgggagacaaagcggcgtcaggatccggatgacgccaaatacaacagccgttatattcaccgatacgtcctgccaatgctgagggagcggggattcggggatcgtgaaattcatcagcttatgagggagaatcccagagcctattttgcagaagattagatttccaaacatgcacaagggaggaagtacagcatgaaaataaaagaaatccacacctatctggtacgtcccagatggggatttgtagaaatagagacagacgacggatataccggctggggggaacccgtcattgagggcagggcagccacagtcaaggcgtgtgtggaggagatgaagccgtatcttctgggtgaagatccgggtaatatcgaggatatctggacaaagctgtacagggccggattctatcggggcggccctgtgatgatgagtgccatggcaggtattgaccaggcactctgggatatcaagggaaagaagtttaatgcaccggtttacgagctgctgggagggaagtgcagggaaaagatgcgcatgtattcctgggttgggggggatcggcccagtgatgtggcggcagcggcgaaagagcgcatggacgctggcttcactgcggtaaagatgaacgctacagaggaactgcagatcgtggacagctatgacaagatcgatgcggtgctggaacgggtagcttccatccgggaggcatgcggaaaatactttggcattgccattgattttcatggccgcgtccataaacccatggccaaaatactggcaaagaaactggaagagttcgcccccatgtttatcgaagagccggtgctctgtgagaacatggaggagtttaaagagattgcccgcattgccaatatcccgatagccacaggggagcgcctgtttacaaaatacgatttcaggcgtctgttaaatgcggggggtgtggacatcatccagcctgacctgtcccatgccggggggataacggaagtgaggaagatcgcagccatggcggaggcctatgatgtggccctggccccgcactgcccactgggaccagttgccctcagcgcctgtctacaggtagatgcagtcagttacaacgcatttatccaggaacagagcatggggatccactacaatcaggggcatggagttttggacttcattaaaaatccccaggtctatgcttttgaaaaggggtatgccaagttcccccagggacctggactgggcatggaaataaacaaagaattgatggcagaggagaataaaaatccccatgagtggaagaatccggtgtggaggcacgaagacggctctatagcggaatggtaatggggggcgggacgtggcgatgaaaaaatatctgattaccatagacggcggcaccaccaataccagggtggcgctgtggaaggaaaataaagaatttctctctgccgtgaagtcggaggtgggtgtaaaagacactgccagggacggaaacaatgccagactgaaaaaggcagtaaaatccatgctggaagaaatcctggagcgcagcggtgttacttatgaagaggtgtgggctgtctgcgcctgcggaatgctcacatcgaatgtggggctttgggaagtgccccatctgactgcgcctgccggtttggaggattttgctcaggggataaaaaaaatattgattcaagatatctgcccattacccatcttctttattcccggaatgaaaaattttactggggaagtcagtctggataacctggaaaaaatggacatcatgaggggggaggagacagagacagcagccttaatggaactctgcccccagggagaaaccctgtacgtactgcctggatcccatacaaagtttgtcactgtagatagaaatcttaagatgaccggctgcctgacctcactggcaggggaactgctggctctgctgaccaggggcagcatccttgcggatgctgtgaaacgggaatttgtcacgggagactacaaccgggagatgcttcttgcaggggcaaggcagacctgggagacaggcctgtcaagggctgccttcctgacacggatcgtcggccaatttgtcacagccagccagccgtcctgcgccagcttcctgctgggagcagtaatggcagcagacatccaggctgtgaaaacaagcagggcactgacagtgacagaggatatgaaagtggtgatagccgggaaagagccgctgcggggggcgctgaaagaattgtttatggaggatgggacatttaaggaagttaccgtttttcagggagatgaggatgttctgctgtcagggtatgggatgtgcgtgatagcaaagaaagcggtgctgccctcactgcccaaaccatagccaggggattaaaagcgtctgtgctggagaacctcttttacaatcagccgtataatggtatactgatggcagaactttatttctgtaggaggataaatggatcgaatatatgttgtagaggacgatatccggctgcgagaggaattgcggagtatattagtgaaaaatggttatgattgtatatgtgcggatcgctttgaacatgtgacagaagatattataaaagcggctccggatctggttttgctggatctgagccttccagtatatgatgggttttatatctgccgcagtctcagagaggtgtcagatcttccggtgattgtagtcaccagctcaaacagtgatatggatgagctgatgagcctgaatgtaggggcggacgactatatcacaaagccttacaatatccacatcctgctggcccatattgccgcagtgctgcagcgtgtccatgggcggaaaaacagccggatactggttcacaaagggctgactctggacataggcaaaagtagggcttccagcggagaaaaaagtgtggagctaacgaaaaatgaacttggcattttgaaactgctgatggatcacaaagggaccattgtgcccagagaagagctaatccaggagttgtgggagatggaggagttcgtggaggacagtacactgaccgtcaatataaaccgcctgaggaaaaagattggggatcttggacttccggactatcttttgacaaaacggggacaggggtatctggtatgagcttttttcgctattgcagggacagatggctttctgtccttatctttgtttttgtatttgctgcggggggcggcattctctggctgattggcaccccctttgctgtagcctgtgttgtggagggattctacgccgcaggcttttttctgattctgcttcagggctttcttgccagaaaggagttttacgacaaacttcttgaggcatcagataatctggaggaaatctcctatctatcagaattcctgaccgagcctcactttctggaaggggcaatcctgtactgcattctgcagaaggatgaaaaatatttgaatgaccggattgcggcttatcaaagggatttgcaggagtacatggattatgtggagacgtgggtacatgaggtgaagaccccaatagcagtctccagactgataatggaaaataacaggaacgaggtaacaagaagtctctcggaggagatggataaggtggaaggctttgtaaaccagatgctttattacagcaaaagcggcagtctgcaggatgactatcagatccgcagggtctctctcaggacccttgtggtagaggcggttaagcacaatgctaagtatatgattgcacagcaggtagcgccgaagtttggggatttggactatgaggtgctcacagaccccaaatggatggactttgtgcttgggcagattatttccaatggggtaaagtaccgagctgcggagcgcagttcggagattgcattttctgctgtacagacaggaagaacagtgaccttatctatagaagataatgggatcggaattccggcagaggatttgggcaggatcttcagaaagggattttcgggcgtaaacggaagaaaatatggaaagtctacgggtatggggctttatctgtgtgatacactgtgcagaaagctggggactgatctgtctgtatcttcccgtgaagaggagggctctatctttgagcttaagctgacattagcttcagagaaagaaacaggattggtgtaacatttcaaaattgtaatgctgctgttaggtaaggacgtggcagcatattgatctccatgctacactggacctatcaaatgatggaggtgtatgaaatgaatcctgtgttaaaagtagagaatctgcagaaattttataaaacaaaaggcgcagttacgaaagccgtcaacaatataagctttgaagtggaacagggagaatacattgggattatgggggcttccggaagcggaaagacaactcttttaaactgtatttcgaccattgacaaggccactgcgggacagatcctgattcaggggcaggatgtcacaacgttaagtgataataagctggcccgtttcagaagggaacagctgggatttatcttccaggactttaatcttctggatactttaacagggagagacaatatcgccctggccctggcaatcaatggtgtgaaacccggccaaatatcacggctgatcgaacaggtggccgatgacctggagattaaagccatcctggataaatatccatatgagatgtctgggggccagcagcagcgcgttgcctgtgcccgggccattgtgaccaaaccttccctgattcttgcagacgaacctacgggagctcttgactcaaagtcagcgggaatgcttatggagagtctgagcatattaaatgacagaaaaaaagctaccatactgatggtgactcacgatgcttttactgcgagccactgtaagcgcatactattcattaaagatggacagatatttaatgaactggtgcggggtgagaaaagcaggaagaaattttttgatgaaattatgcaggtaatttctttcttaggaggtgataacaattatgctttctaatagaaagaggtgtaaaagccaatcctccttacatggattcttccggaagctgtcttctaagaatgtaaaaaaatctgcgaaggattactttatctatttttttacactgatgctctctgtctgtctgttttacagttttaattctatcagtacgcagtttgcctctctggggcttgaagatcccttaagctatcttgcattttcctccaccgtactgaccgtattttcagtgttggtatgtattattatgggagcgctggtggtttatgccaaccgattcttgctgagacgcagaaagagggagatgggaacatatgcagtgcttggactggaacggagagatctgaaccggcttcttatgagggaaaccctgcagataggagtgctttcactgctttcggggatagccctgggaatatttgctgcccagcttctttctctggcaactgcccgtctgatcggaatcagcctggcgaattaccattttatgatctctgggaaggcaattatattaagcattcttttctttggagttctatttttctttgtccatctgttcaatgtgagggaacttaagaaaatgactcttctggaaatgctccatgcaggaaagaggaatgagacagtaggtgagggaaaaagcggcttttccgtattgctgggtattatctctgtcttatttattctggggggatatggaattgtgtttgtaatgtccgaaaaggatacctttagagctttggctctgggcggactgctgttaattgtcggcacggtatgcttctttagggcggcactcacaatatctacaggcttaatgaagaaaaataagcggcgttactaccgcggcattcgtatattcacaacaagccagttttcctccaggcttaaaacggaagggagctctctggcaatgacagctgttcttctgttcctgtcgttttccctgacaatattagggccgggactggggaagtttgtcatgaatgggatagaaaatgcagtgccctatgacggaactattttttacgctccaatggcagggaataaagaggctggggacgatcctctgggatacttgagccagtcgggattccacatagatgagttttcggacgagtatgcagacttctggacttataagtcatccgaagctacagcaggattcctgacaggaaaagaaggcggtgaatcagataagattccccttaccgtcctgggattagaagactataaccgcttgcttgctctgcagaaccagcccccggttcagctggcagaaggggaatacgctgtaagctatgcttttccggccatggaagaggtcctaaaagcctttcaacaggaaccccagccgttgaagcttggggacagtaccctgacactggccgaggacggaatatttcattacggctgggagaacactaacatattagccgagcagggaacactgattgtcccccagtcattggctgagagccttacccctcagagatggtttttgaactttaattttacccgggaaggggatgacctgaatcttaagctgcatgaccgctgggtggacgccggcctgaacgggtatgtaatgtggccccgggaggaagtactggtgtcattgagctctgacaatcttcttgtgacatatctgggtatttacctaggtattacatttttgattacctccggcgcggttttggcactccgccagttatcccagtcttccgataatacggaacggtacgggattcttaagaagctgggcgtatctaaaagggacatgagacggtcgttaaggaagcagctcagagtatatttcgggcttccgctggtccttgcagtcctccattctgcagtgactgtattagccatcttccggtattttgaagggttgcagctaacggtaatggtttcggtcattgggtttggggcgctggtaattttatcggtttatggggtatactttattgcaacctatttggggagcagacgtatcctggaactttaaaaaaaataattctaaatgctgcaactatggggaggcattcagaaatttttccggccgctgctattgtatggcagcggccggaagtaggttcacttatgcagattcagaaaccgcccggtaaccggcttttaatactgcaatgttagattcattattttttatttttgccagatacccgcaaagccctttctccacatcttccagcgtcaaaagatcgtcagctgcggctattgcagccccaagtgcacagaggttggcgcttcttgcgttcttaaaatgagcagcaatatcgtttgccggaacggagtatatctttacattggcagactccggtattgtttttactatggaactgtttataatgatacttccccccggctttacgctggacataaatttatgcaaagcaggttcgttcatggcaattaaaacgtcaggggttttgggaaatggactggccacctcctcgtcccccagcttgaccgtacagttggcagtgccaccgcgcatttcagagccgtaggagggaatccatgtgacgtccagatcttttgcagctccggaataagccaggatcataccggcggttaaaacaccctgcccgccgaatcctgcaaatacaaattctttcgtcatgatgcagcacctcctgtcttaatctctccgatgggatagacggccattacctcagaggcaatgcgatctacagcagttaccgggtccatatgccagttagtgggacagggagataaaatctctacacagctgtacccggctccggatatctgtgtttcaaaggccctgcggatatactgtttggttttcagtatactcttggcatcatggacgctcccccgggccagataagcggtggatggaatcggacgcagatgatccataatatctacgggcataccgttaaacgcagcggtcttcccgttgactgtggttgcggtcttctgcccgatcagggtggttggggatgcctgtccgccggtcatgccgaatacgccgttatttacaataattgcagttattttttcattgcgctgggcggcatacactgtctcggaaaatccgatggagatggcgtcaccgtctccctgataggtaaacacaagcttgtcgggacggcagcgtttgatgccggaagcgccggcgcccgcccgtccatgggggcagcccagccggtctaccttcagtgtattgttcaggagacatgcacatccaaccgcaagggcgcagatggcatcctgctgttttatgcccatctcatccagtacctctgcaatcagccggataataataccatggccgcagccgggacaaaaactgcttgtaccggaaataagtgcaggaatattttttgtcatatcagtatacctcctttgtaccgttcagtattgctttgacattttcaatgatgtcttcgcttgcggcgatctctctgcctgtaggcatagcatatacaggggtagttccgtgagaggcaaggtatacgtcttctatcatctgcgggatgggaatcatctctacagacagatagccttttacttttccgttgtatttttggaatgcttttacggggaagggccatacagtcataggccggatcaaacccagcttcagaccagcgcttcgcgccatcttaaccgcttctttgcagatacgggagctgattccgtaggacacaagcagtacttctgcgtcttccgcctgaacctcttcccatagctgctccttttctttcatctcattataacggctgcagatatgaggaacgtactcttcataggcaaagtcggtatacatgcggtcggtcatcttccgtcccataggggggcggtctccgtccatacccagagcccagtcaaatcgatcccgtttgggatactgctgttcgggaagctccacggaaccgcacatctgaccgatggaggcatcggacaatacaatgacaggggtgcggtatttttcagcggtctcaaaggcctttacgacaaaatctgcattttcctgaatggaggatggagcataaaccggaataaaatatcctccatgcccgccgcctttggtagtctggaaatagtccccctgacctacggttacatctccaagcccgatgccgaaacgggccacgtccacaataactgctggaagttcaatggaagcgagataggagattccttcctgcttcagtgaaaatccaggtcctgaggagctggtcataactctctgaccggtggcggcgcctccgataatcatattgatgccggcaagctcagattctgtctggacgaattcgccccctgcttccggcagtctccatgataagtactccaatatctctgactgcggagtgataggataacccgcaaataaccggcatccggcgcggactgctgcctccgcaagggcattatttcccttcattagctgcttcatagttatcccacctccctaaaactaaatacgtaatccggacatactgtgtagcacataccgcagcctatacacttctctgtctcaatatccaccatgtgatatccgttggcattggtctcttcagagaaaaaaagtgcgttttgtctgcaggctctgatgcagtacccgcaggacttacagatctgcggatgtaacataattgtgctcattggtataccccctttcttttctttacaattttgtacttgtttgttgattgtaaaccagaaagggttctgtactggagaatggcgttatgtaatttttaacattagtatgtgtagtatctataaaattgtcaatagaatttaacaaaaaaaataatgtttggataatattgacgaaatatttaatgaaaaattgttaaatagcaactctacttaatccgtctgtgtgtcccagcaccagtgattcagcacggccttttccagagctggtatgtctttgcgtttgatggctgagagtacggccctgtgcccttcgttggagcggcggaaggtttcgtacatatcagaagcctgggaaatgttaaatgtatgtctgggaaactgacgcttgatggacgcaatgacttcaattaatgtctgattatttgttttatttatgcagtaggcgtgaaactcttcctgctgttccacatagtggggatagtcattcaggttgatggctgtgtccatcagatcgatcatatttgacattatcacatagtcataatcattcagaacaggcagcacctgacggatggcataagtctccaggcaggcgatgacggagtatgcgttcacttcttccgcatggttgtgttttttaacgaaaaaccctttacggggaacattgtccagcacacgatcggctgccaaaaggagcagtgcttctctgataggcgtgcggctggtgccaatctcattgataagccctgcctcatcgatcttttccccttccgctaattcccccagttttattttctcaataatgtactcgtagacctgatctacgagggatttcacttttgccatgatacacctcaacacttagatttatttgccggctaaattaacagacggcttactttgggctccttccgcgaggcccatgatatttccaattatatcatatactgtataaaagtaaaatatattttgtgcaatatatgcgcgaaatataatatataatattttatgataaaatatattgatatcggtataaaatattggtattgtgtatttagtacttgtttgttgcttggaatatataaatattgtgcactttatacaactgctgaaaggagatgattaattaaagtgcagtgtgatgttttagtgagagcaaaacctattatttgaggaaggagaaacctatatggaaactcaaattagtaaatttaaattatatgcaactttatttgcacttggagttgcgggtggctctatctttattattccgtatattaaatttgtattttatgatttgcagctgcaggtaaccggcatgacgaatacccaatcagcacttttgatgactgtgttttccgtggcatcactggtttttgatgttccctgcggtatgatctgcgataagattgactctaaaaaaggactagtcttcgcgcttctcgccaccacggcggttacactgctctatgcatttgcaagcacacattatgttgtttccctcttaatctggatcatattggcgtttttaaccatgggtatctactggcccattttttctaaagtgctgaatattatcgggaataagaccggcacagcaggccgctccgggtcttcctttggctggtactatgccttcaacggcatcagcgctgcagtgctggaggcattggctctgtgggtttccacaagattcgaagatcctgtcatgagcttccgcatggccattctggtagcggcaggctccaccatcctggccactgtactgattattttcttatttgacagtgagctgacagctccggaagcggttcaggctgagacagagaaaaagcacagcggcatagaactgaatcagcttacggaggtactaagaaatcccagtgtctggatgatgatgataatctgtatgattgcctactgtatgtacagcatgatgtcctactttaccccgtttttaactgcagtagtgggggtgtccccggaagcttccggagtgtttgccatcattcgaacttacatattcctgatcctggcgctggtgggcggtctgatcgcggacaaagtgtttaagggcacgaccaaatggattatgctggtattttttgtgacggctgtcatcatcgggggactctttattatgcctcataatgccaatgtgatgctcatcagcatctataccctgattcctgcagcattggtgcagatgtcttatcccatcaagtactctgtgataggagaaatcggtgtaaagcagcaccttttagggaccgctaccggcctggcggctctggcgggggcgctgccggatctggtgcttggtccatttatcggcagcatgctggacaccaggggaaatgatgcttattatattctctttgggattctcattgtacttcttttgacaggctgcttctgctgctggcgcatcgtccggaagcaaaaggccgcaaaactggcatagagacaattgttttgcaggaggtggtttatgattgacaaagtaacaacgcttatggcagcggtggataccatccattccggcaataccataatggtaggaggatttactatttcaggctgtcccctgggactgctgaaggaattatcaagacgccccataagtaatctcaccacaatttcggaagacataggctttgcaaatacagcatccttccccgcagaggcgatccgagaactttttaccggcgggaggatccgaaaggtatgtgcctcctttatcggggctaatccttttgtaaatgagctcattcaaaagggagaactggaatatgaactgatcccccagggtaccctggcggagcgcattcggaccgggggttccgggatcgccggattctatacgccaacgggaatcggcaccatcgctgaaaaagggaaggagaaaaaagtaatcaatgggaaggagttcctgctggaactgcctctccgggcagatgtggctctggttaaggcctataaggcagatcccatgggcaacgccgtgttcaagtattcttcaatgaactttaatccgcttatggcaatggctgcggataaggttattttggaggtagaaaaactagtggagatcggtgaaatcaacccggaattggtgcagctgcctggtatttttgtagatcaggtgatcctgtcggagaggagggctgcagatgtacaaaaaacgtgagatcattgcccttaatattgccaatatgctgcacgatggtgattttgtgaacctgggagtgggaatgcctaccctggtagggcgctatatccccagagacattaccgtatggctgcacggggaaaatggctgtgtggggcaggacgccaccatcaccggaacccaggaggagatgcagcgctggaaagcggagcacggaggcgaggacagtgactggaaaaccggacacagagatttgatcaacgccagctgtgagtatgtaacactccttccgggaggctgctgctttgacagctccatagcttttgcaatggcaagagggggccatttggatgccacagtcctgggcggcttacaagtggacgaagagggaaatctggccaactggatggttcccggcaagcgggttcctggtatgggcggcgccatggatttggtatgcggtgccaaaaaggtaatcattgccatggaacactgcacaaaggacggagagcctaaacttttgaaaagatgtactatgcccctgactgcagtagcctgtgtggacgttgtggtgacagaattctgcatcctggagcgccgtggcgggcaatttgtggtgacggccatgaacccggagattgatagagaggaactgataaagataacagaaatggagctggtttttgataaaaggcttcatgtgatggagatgcccgcagattagaagtttacagagaagaggaatacgatggtaattgatggaatcatgtcggtaatcaacaaatacatcgaacttggtgatttcctctgggaaattcctatgcttatatttcttactatagttgccctaatgtataccgtagggaccagaggcttccagttccgctattttgggcacagcataaactctacattgggacagcagattcggggtacggcggccgggacaacaaaaaaaggaatatcctccttccaggccctgtgtatggccctatgcaacacattaggggttggcaacatcgcaggagtagccgtatccattgccctcggcgggcctggagcagttttctggctctggcttgcaggaatattgggactgattatcaaatacggagaaatagcgctgggtgtaaaataccgggaggtagatccggagacaggtatgtaccggggcggcttaatgtggtatgtggagaagggactgggcaggaggtttaaatggctggcggtgttctacgcggctacctatgtagtttctaatctcaatgcgcccgcagtacaagtgaataccattgcttcttcggtgactacgtgttttactcatgttcctcccatgctggttggcgtaatcgcttccgggttaatgggaacggtattgttaggcggcttaaaacgtatcagtaaggtggcagaacggattgtcccttttatgtcagtggcctatatggccattgtagtgattattctgctgatgaattttaccaaaattccttacatatttgaacttatttttaagtatgcagtgaccgacgcaaaggcagccgccggcgggtttggaggcgctacggtgtcaatggccgccaggtatggctttgcccggggattttattctaatggggcagggatgggcgatacggcattttctcatgcttccagcgatgtggatcatccggccaagcagggcatgtggggcatcagcgaggtgctcatagataccattatctgtacctgcacagcgtttgcaatcttaattacaggaagctgggagagcggcgaaagcggcgctgccctcactacccaggctatatccaggggattaaaagcccctgtgctggcgaacctctttgtcatggcagcagtcatcttttttgcccttaccacagcagtcatgtgcgcttattatggggagatctgtctttgttattttacaaagagtaaaattgcttctaatgtataccgccttctgatctgcctgatggctgttttttccaccaatcctgtatttgtggaacgcgtggatatcctttggcgggtgggagacagcaatgtggcaattcttattatgctaagtctggtggtcctggtacttcttcgaaaggatgtgtatgccataacgagggattatgaaagtaaatatttaaaaggaaagaagcagtaagctatatgcctgcagcaaaacgatgagcgagaggaaaggagaatatattatgaaaccatatgcaatcgtagaatggaacgatacaaaatcagaggcaaagggatggctgtgtgtatacaacctggtagaacattattcagggggcggtgtccgtatgcatccctctgtaacgaaagaggaagttatccgcctggctaagatgatggcctacaaatacaatgccgccggtgccgacgactgcggaggaatgaaagctgggattgtatacgacagcaaagcaccggatgcctatgaggtactgaaacggtttatacaggccatccgcccttatgtggatctcggccttgggatcggggctgacctgggaaccaaaggacctgacttttataggatctttgaagaactggggatgcgggtaccggctactaagacccattgtgaggacccggtctgcatcaaaggtcgtgagcagattcccatactggtggatgccatgattgacgggttcacgttaaacgatgccatgacaggctatggagtagcctttgctgcggatgaggcatggaaaatccggcaccaggaagccggcggtgcccgtgtggtgatacagggctttggctgcgtaggtgccagctgtgcttcgaaaatgaagcaattgggatatacagtgataggaattgcagacgctcagaatctggtggtctgcgaagaggggcttgatgtagccgaattaattgcccacaagaaccagtacggcgagatggatcctgcgtatttcccggagacctacgctgtccgccccaatacagactggctggatatagactgtgatattctgattccggcagcccttgaggatgtaatcaacgcaggcaacgcggataaactgggggacaaactgctggtagagggggccaacatcccggtatctgctgaagcagatgaagtactccgcaaaagaaatgtggacatggttccggacttcatagcgaatgtgggtgccatccgattcttttcccgctgccggcgctgtcagatagaattcacagcggagggtgccatccgggacattgaggagggcgttcgtgataacgtgaggatgctgtttgcagaaaaagataataccggaagatacatccgggatatcgcctacgaaaggtttgagcccacaatacagacagaatttgaattcacatcaaatcgctgagaatgcagtgatcgcagttagttataagtggctgaccggtgaaatcccggccagccgcttatttctgtgctatgccatagagcataaaatcaatggttctagacagcttttcttcatgagcgatcattatgttttccaaatctcccccgggaatggtttcgctgctgaagtagccattaaacatttcctgaataatctcataatattctaatgcgtcctcttgtgtcacaccgtcccgcaaagtgatttctgaaagcaccgtccgataaagattccggttcaactggttaaattcttttttggattctgctatggcatcggccaattctggctgtggctgcagcaatgcctcaaaaaatatgcgggcacaactgggatgctccaaaaaatactgaaaccggagttccagatatcttcttagatcacctttaatattctgttcttttaagaaggaggttacatctgaaaaacactttgatacacacgccagataaagctcatcctttcccttaaagttatgatagaataacccttttgaaattccatggttatagcagaccccattaagggtgaagcccgcataccctttcgtaccgaattcctggatgcctgcctcaataattttcttctttgtcagttctgttctttccttttgcttcatctgcgtcacctctaaaaatagattaaactactatacaatagtaaatagtataaatagtaaaaaacatatagtcaataagcgaattcctgcggccccttttccctgtgattattgactaatgttcatatctgtgataatctatttatagactgaatggtctataaaataaagcgagagagtatatactatgtcttatgtgttaaggtttttgacagttattgtatttgcaaagctgattggcaagcttgtttcaaagattaggctgccctccattttgggctggctcattaccggtatgattttcggtcctcatgcgctggatctgctcaatgaaagcatattaaataccacgtggtatcagtctatggtacatatcctggaatgtgcagtaggtttaatgatcggtacggaactggtctggaaaaaaattaaaaaatctggaaaagcaattgtacttaccacgtttacacagtccattggtacgtttttgttcgtctccctcatattcggagccgtattttacttctcggatattccgctgtatctgtcttttatctttggagggattgccttggctacagccccggcccccgcactttccattgtcagggaatttaagacaaaaggcccggttaccagtactctaattcctatggccgcattagatgatatcatcggctgcattgtgttttttacaaccatcgctgttattgcaggaaatctgtcagcagggaaacttccatcctatatggttgcactagtggttatccttccccttgttataggattagctgtgggactaaacacgggatttttaataaaaagggaaaacaatccatataagtcatttatcttaatgcttctgggcattctggcggcgtctgctttggggtttattgttaaccgccgggtgctgcctgagccggtactgaactttatgctgattgggatggctttttcagctgcattttcaaacataatacaagaagagaaactggaaaaactaatgaagatgtttaaccccctgctcagcttttctatggttgtagtgattctcaatctgggagcgcctttggattaccatttgatgttaggcgcaggagcctttactgctatttatattgcgtcacgggctgcaggaaaatattttggagcatattttggagcagccattacaaagtcaccaaagacagtaaaaagatatttgggttttacactgctgcctcattccggtgtatctttagtttttaccggaattgcagtttctgtattgaacggtccggcgccggaatgtacaaaaatcatacagggcacgatcgcggccgccgctgtgatcaacgaaattattgctgtaattatggcgaaaaaaggctttgaatgggctggtgagtttaaaaaggaccttgaaaataaaaaaatacttactaaactttagagagaaagtttaaacataattgccaattgatttctttttggacaggatttataatacaaaatatacaacgtgtgcgagcacaagacaaggagaaatatgaaggtaactattaaaaaaattgcagaggtagcaaatgtgtcccgggggacggtagatcgtgccctgaaccatcggcctggtatcaatgcggaggtagctcagaaaattctgaaaattgcagatgaactgggatatcagccggatccggcggcaaaagcattggcggccaggcggtatgtgccaaaaaagataggtgttctcctttgctctgaagggaacccgtttttccttaaggtcattgagggagtgaatcatgcattggaagagctgcagcacttcggtattgaaagcattcaggtgaacatcaaaggctttgattcacaggtacagattcagaagattgaggaactggtaggccaggggattaatggtctggttctcacgccgattaactctgaggaagtagcagagaaactgcgggaactgcagcagcagggaatagaggtagtaactgtcaatacggatattcccaatgtgcgcaagttagcttatgtgggctgtgattacctggcaagcggtcaggtggcgggagagttgatgggaatgatgagcaacggcttaaaggaacagatagccattgtaatcggatccagacagatattggctcaggacatacgcctgaagggtattaaggataccctgaagtcggatttccctaatgtatctgtaaaagctgttctggagaacaacgatgatgatgagagatcctatgaactggtgaaagcacttctggaggaatcttccgatattaccaggctatgctttgcagcagccggtgtggcaggaggactccgtgctttgaaggaattgcagcttgagcgcaagattaaggtaatcacctatgacctgacagatattgtaagggaaaacattgagaaaggtctgatatctgctactgtatgccaggagccgttccggcagggctacaatggcgtggagattatgggaaagtatctgctgtacgggcagaagccggaaaaaagtgtagtacatacccatgttttcatttcaacaaaatataatctgtaaataagcagatagtgattaaaaattctctttactgttttaaaaatggtaaagagaaaaaaatggcgctgaccgtgttcgcacacagtcaaaaacaatcatacaagttaagcggaggaaaaatatgaaaactaaaagtgcgggaaacgcagatacccatggattctggaagcggatgacttccagagcggagttcagtgtattgattggacttctggtactgataataggtatgagctttgcaagcccggtctttatgacctttaacaacattttcaatgtactgagccagatttccagatatggaattatatccgttgggatggccctgattattatcaccggcggaattgatttgtctgtgggatatgcagtggggctctgtgctaccatggcagcctatctgacaaccaatgcaggcctgccctggcctgcagtgctgatattaattttacttctgggagcagttatcggtatggtaaacggactgttggtgaccaggcttgcccttcccgcattcatcgtaactcttgcagccggtaagattatctcgggatgcaccatgcttctgaccagcggacgccccattgattttgattctcctttggctgtattgggaagcgggtatgtaggtcctgtgcctatgtgtgtaatactcatgtttctgattattattctgggaacaatttttgcacagtgcacacagccggggcggaatatatatgccatcggcaacaatcccagagcagcggccctgtccgggattaaggtaaagaaaatgacctgtctggtttatgtcattcaaagtgtgctctgcgctttctgcgggattgtagttgcgggaaatctttacagcgccgatgctacgctggggaccggatatgacattgataccatcgcggccgttgttattggaggggtttccatgacaggcggtgagggaactatatggggagcattaatcggagcgtctatcatgggtgtgctgaaaaatgcatttgtgttactgagtgtatcatcctactggcagtccatcgtgattggtctcgtaatcatctttgcggtcaccatcgatagaatcagggccaaccggaaagctgtctgaggagtacatataaattaaatggagaaaggtaaaggaggaagcaacatgagaaaaaattggaaaagatttacaggggtatttttagcagcatcattggcagtctgttctatggctgcatgcggggagaaaaaggaggaagctccgaaggaggataccgcagaagaagcctccgctgacacagacaaaggggaggctgccggtgatgtgaagcctatgggcgatattccggaaggctttaactacgacccgctgccaaacagtgagggcaaagagattaagattgcaacgcttaccgtttccaacaacccattctggaacacagtagtagaaggtattgatgcggcaaaagaattcctggcggatcagaacgtaacggtggacgtgattgaatttgatgattttgacggacaggctttcgcagaggcaattgatacctgcgtggtaaagggatacgacgccattacaactgtaggtgtggctgacaccattgttcccgctattgacaaggcaaccaaagcaggaattccggtatatacctttaactctgatacagagaaggaatccacacgtactgcttttgtagggcaggacctctatgccgcaggcggcgagattgccaagaaactggctgagctgacggaagattccggaaagataggcgttatcactggttactataatgtaaatgcccatgaactccgccgtcagggatttgagaatgagattaaaaaccacagtggaatggaaatcgtaggttctgtggaaaatcacgactccggggacgaggcttatacagcaaccaaagactttatcactgcaaatccagacttaaaaggtatcgttgtaaccgcaggggggcctcagggcgcagccaaagcaattgaagaactgaatctgaccgatcaggtacagctggtatgctttgacacaacagatgagatcgtgagctatctggaaaaaggtgtaattaaagctacgattacccaggatccattcggacagggatgcgaccccattatcctggcctacaatgagattgtttcaggtaaagcggatgtgacgggtacggcctatacaaagatggatatctatacaccggacaacgtgggagaactggcaaaatagattgattttgcagctttaccgctgagataactgataaaaagaaggcagccttttacaggctgccggacgaaagggtataaaatgagtgagcagatcgtatatcagattgaacatataaccaaaaaattccctggcgtggtagcgttacatgatataaaccttcaggtacgcaggggggagattatggcaatcgtaggtgaaaacggtgcggggaagtccacgctgatgaatattctgtccggcagctacgaacctacgcagggaaagctggtatttgacggagaatccatgcagcagatgaacccgatctatgcgcaggaaaaagggattgccatgatccatcaggaattgtccctctccaatgcattgtcagtagcagaaaatatttatttaggaagactccccagaaataaagcaggactggtagacagaaaaaagctgtacgaggacagcagaaagatgctgacggaggtagggctggaacatctggatcccaggaccctggtccgggacatcaacgtatcccagcagcagcaggtagagatcgccaaggcactttccctgaatgcaaagtttctgatactggatgaacccacatcttccctgacgccgaaagaagcggatattctcctttctattatgagagcactgcgtaaaaagggcattactatgctttatatttcccataagctggatgaggtactgcgtatcagtgaccggatcgcggtattccgtgatggggaattaatccaggtactggataccaagacgacagaaattgatgatatgatatcccttatggtaggcagaaaatatacaggtgggtttgtgagggatcattataagaccgactatgatgccaaagaggttgccctggaagtagaacatctgaccgtgggaaataaggtccaagatgtgagtttccgactctataaaggagaacttctgggaatcgcaggtctggtgggcgccggacggagtgagattctgcaggccctgttcggagcagacaaaagagatagcgggaccatccgcatttatggaaaagaggtgcctcttagaaataccagcgaggccattgcacataaaatggcgctgatcccagagggcagaaaactgcagagcctttttttgaagtttacagtaaaggaaaacatcagcattgcttttttaagaaaggttctgaataaggcacggctgaataccggccgcaaagagcggctgattgccgaggattttgtggaaaagctgagaattaagacagctgggattaatcagaaaatcatcaacttgtccgggggcaatcagcagaaggtagttctcgcacgctggctggtagaaaaaccagacattctgtttctggacgagccgacccagggaattgatgtgggagctaaaaatgagatataccagatcatcaatgaactggctgaggagggaaccagcattattatggtttccagtgagatgcaggaaaacctgagcctgtgcgacagggtcattaccttatatgaaggaagagtaaccggggaacttaggcatgaagagctgtcagaagaaagtatgatgcagtatatgtcccaggcgaaagaggcataaaaaatgtcggttcttaaaatttagaataatggagaagagagatatgtcaacaagcagagaaagattaaatatgactttaaatcatcaggaaccggatcaattagtcgtggatatgggctctacgtcgattactggtattaatgcaaatgccctgcacaatctgaggaaagcgctgaatctggaagagcggaaggtgaagatctgtgaacctctgcagctgctgggggaagtggaagaggacttgagaaaaactcttcatctggactgtgtggatgtgagtacaaatatgaatatgttcggattttccaatgcggggagaaagccctttaccatgcctaacggcctggaagtggatgttccgctggaattcaacacgacaaaagatgagaaagggcgcacttatctctaccctcagggagataccagtgtacctccttccggtatgatgcccgacggcggattcttctttgacaacattaccagatctacagcaacctgcgacgatgagaacctgaatgcaagggaagactttaaggacgatttcagtgtcattacagatgaacagctgcgttttatggaaaaccagtgtaatgactattacaacaataccggttacgggatagtagccagcggtgctctggcctctattggagattttgcaattgttccggggcccaatgtaaaatatccaaaagggatccgagatctgccggaattcatgatggcacattcaatctgccccgaatacatacatgagctatttgagatgcatctggagtatgctattaaaaatgcagaacttatctatcaggcatgcggggataagatccaggtagtatacatctccggtacagattttggcactcaaattgggccttttatgtccctggactcctaccgggaattctataaaccatactatcagaagattaatggctggattcatgagcacaccaactggaagaccttctaccacacttgcggtgccatcagcacctttctgcaggatttttatgagtccggcattgatatcctgaatccggtacagctttctgccaaaggaatggacgggaagacactgaaacaggaatggggtgacaaatttgtattttggggaggcggagtagatacccagaatacgctgccgtttggcactccggaagaagtatataaagaagtatcagagcgtattgaattatttgccaagggaggcggttttgtattcaataccacacataatatccaaagtgctacaaatgctgagaacatacttgctatgttccaggcgattaatgattataagaagaaataactcattatcatgaagcaccggaggggctgtcgcccggcggttatgaactgcctgtgcgccggtctctttttatatacctggtgtgcacgcacactatagatgagaatgggggtgagtttgacatctgcaataggaacgggacagccagcagtacatgactgtccgtttatcttaacatatggataagattggaggatgaaaaattgaaaatctgtaaaaaattagtcagctgtctgctgacggcagttcttgcgttaacggccctggcacctatgtcagttgccgcagagcctggagacgaacagggatttcaaatcgtggtgggcaaagcagccactgatatgcaggactatgcggcaaaagagctgcagaagtatctctaccagctttccggtacacacgtacctatcgtaacggagacggaaggcatggagctgacaaatgcctttgtacttggaactttagaggctaatagccagatcggtgcagtgaaggaagaactggaatccattgccgggacaggtgccgaaggccatgaaggagagcagggatatatgctgaaaaaggcaggttccactctttatatcgggggtaccgatgacgaaggagctctttatggggtctatgggctgttggatgactattatgggatcggcttttatttctcaggggatgtaatacctgaagagaaaacagccctctatatgcccgaggtggaggaggctaagactccccggcagtatatgagaggtgttctgccctggacgaattttccacagtcggccacggtctattctacagaggactggatgcacatcattgaccagatggccagaatgcggatgaatttcctgaatatccacaattataacggacaaaatggacataatgagatgttccacaactttacttacgatggctatacttcccggaactggaaccccacggctaaaacaggacatttatggggatgtcctggctgggatgtgaataaatatttatttggagcttccgatttgtttgatgattatgactttggtactgatgcgactctccataatgactgcttaaataacaatgaaaattttgccaaaggatcttctcagttccagatgattattgagtatgcccataaacgtggtgtaaaaatgggcctgggactggatatcaacctgattccggatggatacagcgcggaagctaaggatcctggcgttttgaaagcccggacggatcagattatgaaagattataaagacttggatgttcttctcctttatatgagtgagaccattggaaattcggcgtccgcgctgaattactggaaagagtgctttgacggattttacagtgctatgaaagaagggcagccagagacccagctggctatctctggctggggggttcgtgcagacattgcggcgtatgtaccggacgatgtaattgttgctccaattgcagactactccgcaggttttgtaaacggtaaaaacacgtatggagaaaataaggaattctggggaggtccctggatggaacgtgactttgactcctccgtttatttttatccctataagatgggactggaccagaccattgcaagctatcaggagaacaaggatagtatgcagggtatgtttacgctgacctggcggctgaccgacggcgtggatgccaagatctcctatgtggccaaagcgccttgggaccgggaagagagatataatacagaagagagcgtatacagggagtatgcagagaaatgttatggggatggtgcggcagatgacatgacaaagctcatttatgcagatgaaaagacggttgtgcctaccctctggtctgaatgctggaatactcccgaattcaccaatggagaccgctccgcggatattgaaaggatgcaggggatgatcgaccgtgtggatgccgcaattgctgtatcttctgacagcggatgcatcgaccgcctggagaagctgcgcaatcgcctgatctgcgcacagtattactgtaaattggatcaaagttttaacagcacttcatgggaaaacctgcaggatgatttttctgtctgggctcagtcattcacaaaccgtgtggatgatatttcctctctgggcaatgtgcagagttcccagaaccgttttgtccagcttcgctatgcgggaagagagacaagcctgagaaacgcacaggcaattaaagctccgttgaatgtaactgccagaggaaccacagacggcgcagcactcgcctggacctatgaagcggacactgcagatggattccttgtgtaccgtgacgaggaaaagattacagaggctccactgggcgcagatgtaagagaattcacagatacatacgatggggaagcagtctacacagttacggcggtgacagaggaaggggagagcgaagcctctattccacagacttgcgaggccggtgcagccgatcagacaacaccgaagccggttgttgtatcccctcctacttctatacgcgcgggacaggatatggcacttaaggtgcgtattttagatgagagagactatgatgaactcagtgcagcgatccactaccgtgctatgggatccggggaagcctttgctgaaatcccaatggaacacagggtaaaaggaacgtttgcagccagtgtgcccaccagcggatttgcggacagcggcattgaatattttatctctgtttcagacggtgccaatacggaagtctggcctgccacggcaggtgaaaatgggctgaacgctgcctgtacggtgtatacagacggggacggtgccagtgtactgcgtgcgccatccagtattgcagaggaagacggaaatgtagtgtggaatgatgcagtgggaaatgtgttctggtataagatatacagaggtgacacccctgatttcaatccatccggggccacgtatgttacttatgttgaaaaaggtactacctccttcaaggatgtgggcatagattttgacggtgagaaattaagcgaaaagaccaattattatcgtgtcacagcagtggatcgccatttaaatgaaagtattcctactatggcggtacaggtaggaagcccgcggccggatccgatgtccaatacattatttgtggatgcagatgagttatataatagccgggcagccgcacagactggatcaagcactggctccgtagtcggatttacagaggagggaggctatgcaatgtttaaacagcttccgttttccaaaagtgcagtatgtaattctgtagaagtaacatattcgaccggcggggcaggagcaatgctggaagtacatgcggacgctccaaacggagagcttttgggagaagcgtacttgcctggtactggtgcgtgggataaattcacaacggtgtctatccccctggaaatgggggaaggcggtacccgtgacatctattttgtttaccgtggccattatagttataatcttgattacttccgctttggcattacaccggagacatctccagatgatattcaaattactaccaaggatatgatggcatttagaagtaatgcagagtctgacatgaaaggcaccgcttcggaaatttctggattcggttatgaaggcgatcgaattgcattgggcaaggggttctatatgaatgacgctgagcatgttactgtgagtgcctctaatgttgatctgccgggatatggaatggtctgctttcctatcggtgttaacaccagtccaacagcatggatggagttttccaagctgcccacaggcaaagcatggcttgcttacgataagcactacgaggatccaggacataaacttgcagtgtacgtaaataacgaaaaaagatccgatattttgcttcccgacaattccggatccaattggaataaaggcatttttaaggtgttgtatgcggatagcggtgtaacattggaagaaggggataccattcggttccaaaatgatgctgcatgcccgttaaatgcaaacaaactatttgtggaaaatccttattctgcaaagcaagtagatatcacttattctaacaatgcggatacacagtacagcctgtatgtgaacggagagaagcaggagagcattatactttccaattcagagggcagaaaaaagacggcatctgttccggttgccgtggaagacggtttcattgagctggtggtagaagaggaagatatcgcggccaataacaacatgaagtctattatatataacatggtattgtgcaaagaggccagatctttaaccaggaccattaccgtgacggcaggccaggggggcactgtgacagccgagggggttgagctcccagaagacggaattcttacggtgccttacggtgaaagccaacggtttgacttccatccggaagcgggatacgctgtggagaaagtgctggtcaatggggccgactatgggcagcgcagcagctatacctttgagaatctcagttacgatgcggcactggaggttactttcagccagggtcctgctgtcacggagtataccgtcaatatcggggacacaccggggggacagattatctctgatctggcaaaggcccagaagaaccagccggtaaccctggaagtgaaggcggacgaaggataccattatgcagcaggtactctgcggtatacatcagcgtcccagccggacggtgttgccgtcagtgatgcctccacccagttcagcatgccgggtgaggatgtgacggttacggccgaattcgtagagaatgatccgatactgttagacagcatcacactggacggcctggagaggacagagtatgaaatcggcgaggaactggatcttgcaggactgaccgtaaccgcacattacagcgatggaagcagcgctcaggttacggagtatgagacaagcggatttgattctgagactgccggggaaaagacagtcaccgtcagctacacagagggtgaacttacaaagaccgcagactttaaagtgactgtaaaggaaagagtattaaccggaattacagtggttccacccgccaagacggaatatgaagtgggagagccttttgacagcacaggaatggaagtgacagcagagtattccaatggagacagtgaagcggtagaagaatacgcagtctcagaagtggatacctgcaaaccgggagaaaagaaggtaatggttacctaccaggatcagaccgctgagtttaccatacaggtgaaggaaaaaattctgaccggaatcgaagtaatcgtaccggataagacagattatcttacgggtgaggcctttgaccccacaggtatggttgtcaatgcagtatacagtaatcatgtaaaagaggaaattgctccggaagagtacaccgtggacggctttgactctgcagaggcaggagaaaagaccattaccgttacgtatcaggagatgacggcagactttacggtaaatgtaacagaagaagtggaagcgccggtactggcaaagattgtcctgacaccgccggagaaggccgagtataagacaggggaaaccgtggatacggaaggacttgctgtatatgcacactattctgacggcacctatacagaactgacagcgggcagctatcaggtaacggtaccggaacttacggaagctggaatctactacgtaactgtgacctatgaggatatgactgcagagtacatgattgtggcagaagaagaaccggtgaatgtacctcactgggaagaggaccggaacggctggtggtataacaatggagacggaacctatcccaagtcctgctggaagctgattgcagacaagtggtattattttgaccggtacggctaccgtatgacaggctgggtgcaggacggacagaactggtattactgtgataaagacggtattatgcagaccggatggctgctggatggaaccacctggtactatctgaagagcagcggctccatggcagccggctgggtacaggtaggaaccacctggtattacatgagcaggagcggagcgatgcagacgggctgggtacagatcgaaaagacctggtactacctgaataagagcggagcgatgcagacaggctgggtacagacaggaactgtctggtattatatgaataagagcggggcgatgcagacaggctgggtaaaggacggaagtgcttggtactacctgaacaaaagcggagcgatgcagacgggctgggtaaaggacggcaggacctggtattacctgaataataatggcgccatggctgtcggatgggtgaacatatccgggaaatggtattacttgagagagaatgggggaatggcttcgaatacctggatcggcaaatattatgtaaatgactcaggagtttggacaagaacaaaataaaaaataaaattatatgcaaggatttggtctcctcaatcgtgttacttatataaaacaaaatataaaacacatttaggagggaatctatcatgaagaaactgataacgttaggggcagccgcagcacttgtatttacaatgggcacggttgtatttggtgctgatatcaatatgaccggagagaaccaagggatcccatgcgaatatgcggatacgaacggggatggtatctgtgatacctgtaatcagcgctgtacagagtatgcagatgagaaccaggatggtgtgtgcgacaactgcctgaataaagaaacagatggagaggcacaccataatcccagcggccataacacatgtaagagaagcggtacctctgcgggaactcatcactcttttgggactcatcattcttccggtcacgggcatggaaatcatcataaataaaaaaatatccggtatagggcagcggtcacaagcgaccgctgcctgttgccgttacgcggcaaagattaagatgaaaagtctgtcaaagcagctgctgctgcggtatactacatataagaataccgggggaggtgcgtgagtgaggagtgaacatgatgtaaacggagcagtggaagcatatgcagatatggttcagcgcatctgtttctatcatctgaaaaacaaggcggatacggaggatatatttcagaatgtattcttaaagtatatgctaagcgatatggagtttcaggatgaggaacataaaaaggcatggattatccgggttgcggtaaatgcctgtaaggattttctgaaaagctttttccgccagaggacagttcccctggatgcgatgaatgaaactgccgtataccccctggatggggagaaagaagtatttgaggctgtattgacactgccgggtaaatataaggacgttatctatctgcactattttgaaggatactcggcggctgaaatcagtacgatcctgggaaaaaaggaaaacaccatttattctttattatcaaggggaagaggacttctgagggaaaagctgggaggtgaagaatttggcgaatagaatccatgatatgtttgaacctgtaaaagcgagtgaggaactgaaacaatctaccgtagagtttctgcaggcagagcggcggaaaagaacagcgcatttcttacgccctgcagtgtaccggacaatcgccgcagtctgcgtaatgctgatgcttctggccggcataggcggatattctgtcatggggacacctgtctcctatgtaagcattgacgtgaacccttccgttgagcttgcgctgaaccgtcttgaccgggtagtctccgctaccgcttacaatgaggatggggaggtcatccttgagggtttggcggtaaaaggaaagaaatacacagaagccattgacttgattctggacagcgcagataagagcgcctatctgacctcggaatccgatctggtatttacggttgccgcaaagaaccggcaaaaaaagcgtgagcttcgcacggggatagaaaactgttccggctgcatggaacacggcggggagagcatcagtgcagaccttggtacggtgacagaggctcaccaccatggggtatctctggggaaatattcagcctatctgaagctttcccaatacgatgagacagttaccgtggaggactgcaaggatatgaccatgtccgatatacaccaccagattaaagaacacgaacaggatgggagccaccagaacggggaggaacacagggaaaatgacgatgacagcagcagttcggatgaaaagcaccggaacagacatcataatggggagcatgagtaaaaaactattgacttttccgaaatggtaaacaataataaagttacttagataaaatgattaataaaagatatcctgaaaggagactgggaaaatgtacgacgtaaccgcattgggggaattattgattgactttattcaaaatggcatcagtgaccagggaaatccggtatttgaggcgaatcccgggggtgcaccctgtaatgtgctttctatgctggagaagctgggctataagactgcttttataggcaaggtaggagatgatttttttgggagaatgctggggggtgtaattcaggagaccggtatatcggcagaaggcctgctctacgacaaggaggtaaagacaactctggccctggtacatcacaaggaggacggagacagagatttctcgttttacagaaaaccgggagcggatattatgctgaaggcagaagaactctcaaaagagcttatcgaaaactccagaatcttccactttgggacattatccttaacagatgaaccggcggcagaggccacaaaaacagctctgtcctgggccaaaaaggcaaaggccctgatttcctttgatcccaattaccgcgctcccctgtggagttcagaagaggcagcaaaggaagcagtctggtatgggattaagaactgtgatatcttaaaaattgcggataatgagatccagtggctcacgggaaaatcgtcatacgatgaagggatcgaagaaatacgaaggtatgcagcaccgaaacttatgaatgtcactctgggaaaggagggaagcatcgggtactgcaacggaaaaaaggtctatggcaaaccattcatatcggatcatacagtagataccaccggggccggagatacgttttgtgcctgtgtcttgggatatgttctggaacacggactggatgatctgggtgagaggcagctggaagagatgctatcctttgccaatgcggccgcgtccattgtcaccacaagaaagggagcaattcgtgcgatgccttccagggaggaagtgaaggcgctggtacaggcataaacaaattctttttagataattttcatccctcagggaaactaacgataatctaacattgcatatggtattattcttcctggaacaagagaatgcatcacaacagtttcggaaagggaaataccatgaattatagaaaaataaagaaaattatggctatacttcttataggagtatcacttgccggttgcactgaaccggggggaaataaatctggtccggatacttctaacgcagcagagagtaacgaaccttcaacagtagaggagcttgcggattattttatgaaggctgcagagggttatgcctcctccacagaacgggcaggagtgctcgagggtttagaagaatctcagaaggccaccaggctgcagatgcttgtgcttgccagccgcgcgtttggcaggcttccggctccggaggggtacccaaaaaggatagcagccccagcgcctgatctgacagacatacctaagtgggcacaggcagacttgcagaatctggaggacagtgggattttggctgcttccgacctggtaaatacgtcagatggagaaaaagaggggggatccgccaaaagcggtattttagaggagccggccactatgaaagatgcccggattatcgccgcaagattttttgcattctttggcacaaatgagaaagatgacttctatacagcggtgaaccgacagcagctcaatacgcttgagataccggaaggcatggacaccgcagggggctcaagcgctgtagcagccaatacggacgcgcagctcaaggagctgattcttgaaatcgtaaacagcggggaagattataccaaggggagccctgagcaaaagatacgtgacctgtataagaactttgaagatacagaggcccgcagcagggctgggatagggcccctgaggaaatacctggatgcggtggaaaaggccggcacattttcagaattaaatgctgccattgccttatcggttcaggagctgggaaacttggccaatggtttactccccgggataccagttaccgatacgaaggacagtagcagaagagtcctgcagctgatgacgcaggttcccggattggtgaagaatgattacgaaaaccctgatggggaagcatataaagaatatcgtgcattccttgtggagcagctgttggcagccggtgagagccagccggacgcagaacggcatgcggatggtattctgcttcttgagaaggacttggctgaccatatggaagagcaggatgtatcagggaaaataaaagatccgaactattatacgccggatacgctggatgagatgatgcctgaggcaaaattctccgaattactggatgccattggacttccctccgatgtaaagatgatagtatttgacgatactcaatttgaggcttattccaaatggtttacagaggagaatcttgaattgtttaaggctatagaaaaaatggcgctgcttacgggatacagctcctatctgagcgaggatttagcggagaagttcggtaccggcggtattacatcggcagatattgctgtgcagaacttcctttcagatgaactgggacggctttatacaaaacgttattttcccgaagaagcaaaggccggggttgaagaaatggttaacttgctgacagatacctttaaggacaggataaaacgcctggattggatggaagacagtacaaaggaagaggctatcagaaaactggattccattactgtgcttatcggatatccggatgaatggattttcaatgatgcagtgatcgccgccggtgaagagggcgggagctattttgcaaatgtagctgctactgaggccgcaaaatggaagcgtcaggcggaggacctgcaaaagcccgtggatcccagacgctttcctctggctgcctatacggttaatgccgcagccagcagaaatacaaataccatcatcttcccggctggcatcttgcaggcgccgttttacgataaaaacaattcctttgaggagaaccttggctccatcggcagcaccattgcccacgaaattacccacatgtttgatgacggtgggtcacagtatgatgcacaggggaatataagaaactggtggacagatgaggattacagccattttcaggcgttatgtaaacgtacagtgtcattctatgagggatatgaggcggtacctggcgtcaaagtaaacgggcaggagacccttagcgaaaatattgctgatattggggggattgcatgcggattagagattctgtctcatatggaaaatccggattatgacgcatttttccgcagctatgcggctcagtgggtgagagtggcagattacagtacactgaaagagttggcggaaaatgacttccatgcacccaataatctcaggtgcaacaaagtgctggccaattttcaggagttctatgatacttatggaatccaagagggagatggaatgtatatacctgaacaagaccgtataaaaatatggtagtaaaataagaatctgtcaggggtgagaatatgaaattattagtagtagaggatgaagagctgctttctaaaacagtggcaaagggactcaggcttctgggatactcggtggactgtgcctttgacggggaggaagccctatatctctatgaggtgaatcagtatgatctcatgatattagatcttaatcttcccaaaatagacgggcttgaggttctgcggcgcatccgcagccaggacgatacgttccgggtcttaatcttatctgcccgcaatacgctggaggataaagtgaacgggttagaccagggcagcaatgattatctgacaaagccttttgagtttcaggagctggaggctcgtatccgtggactccttcggcgtcggtttactactgtaaatactatcattaactgtggcagactctgtatggatactgtagcaagacaggtctggtggggggatgcggaagtgaagctgaccaggaaagagtattctctgctggagtatttatttgtccatgccggacaggcagtgggagcggaagaactcatagagcatgcatgggacagtggggcagacctattttccaacacctttcgctttcatatgcactccctgcgcagaaaactggacaatgcaggggcaaaagagtatatcattacagagcggggaaaggggtaccgtctgcagtgtcccaaggaggacttatgataaaaagacatacgttgcagcttcaaattacagggattgtaggcgtcatattggtgattgtttgtgttctcttaactgccaattcacttttttcagcccaaagctattacggggattatgcttccctgattgaagaggggagggctgaatatgatcccgcactgcctgagggcgagctcccccctgccctgaatcccggcgtaacctatcagcaggcttccttgcggttttcggtacaggtggtcacagccatggcggtgattgtgctgcttgcattggccgccacatactgggcggcgggaaaggctctccgcccgctgaaagacctgacgcagtctgtgcaggcagtaaatgatcagaacctggacagacgtctggaaatcaaaaagtctcagggagaggtaagggtactggaagatgccttcaacagcatgatggaacgtctggaagaggcattcttaattcagaaaagcttcgctgcaaacgcggcacacgagcttaaaaccccccttgcagttattaaaacctcccttcaggtgctgaagatgacaccccgccctgaagtagaagattatcaagagtttatgagtgatacagacaagtctctggaacgaattatcaagaccgtagaaggactgctggcgcttgccagccttggggaggtgcctttggaccaacaagtggagatatattctctgcttcaccaggcagtatcggagcttttggggacagccggggacagccgggtatcactgtcagcggaacaaaaagcagacgcatgggtatacggaaatcccaatctactctaccgtgctttttataatctgattgaaaatggaattaaatacaactgtccggggggctttgtctctgcgtctgttactgaggagggagatcatgtaatggttcagataaaagataacggattgggaattgcggaagaagacctgaatcatatctttgagccattttaccgctcggataagtcccgttctcagcgcataccgggttccggtttgggtttggcagttgtgaaaatgatagtggagagacatggggggaagattgaggcagttagcaaagccggagatggcagcacttttaaaatatatttgccttacctctgtccaaagcttccttcctgaacttgccaggttgtcagatagggtataagagacagcggacagctgaaacttctccagcgaaacggcataaagagagcgttaacagaacgtctaaataggtgaagggacggcggttggtcaccgtcctccaccctattctataaaatccactgtctgttttactttttaatctgtgcctccgggttataggattccagttcagcaactacgtattcttccagatatttcggaatctccaatcgctgggggcatacttttacgcacttttcgcacttaatgcaggcggaagcaggtccccgtccctgttcaattaagttgccgtaatagaaggcctgggtgaggacatcattggcagagctgctcttctccagccttttcatatcgttatacagtgcaaaatagtccgggatcgcaatattcttgggacattcgctctcacagtatctgcacacggtacagggaatgggtgtattggcattaataatttccacaaccttatcaatgatcttatattcctcgtcattgagaggctgaaattcctcaaaagtttttatattatcatacaagaattccatccggggcatgccggcaaggactacccggaccccgggaagacttcccacaaacctgtaagcccaggatgcgatagaagcatccggattgtattctttcatgattctttttgcctcatccggtacttcggccagcgtgccgcctttgcatgcttccataacaacaataggtttcccgtgttttaccgcaacctcgtagatctctttggaacggatggcaggatttttccagtcgatgtagttgatctgttcgataacaaagtcaatctcaggatgttccgtcaggattaagtccagaaattccggtgaatcatgcagagaaacgccgaattcacggaatttaccctcagctcttttctgtttgagaaactcaaaggtatcccatttcttacagttctcataggtctctttgcctatactgtggatcagatagaaatcaaagtaatccacatggcacttctccagctgctcttcaaaaatggtttccatatcctccttttttttcataaatttaataggcatctttgttgagagcagaaaagagtctctgggatacctgtctaccagtgctttgcccagagccacttctgataaccctccgtgataaatataagaggtatcaaaataattaaatccatgatccataaaaatatcaatcatattctcaagggtctcataatcaatcgaacgctgttcgttgggatctgagatgggcagacgcagtccccccagtccgaaccttttgccaaaattaattgccacagcatatcctccttccaaactattcattttcatttttacctgagtcttactatcaggctataatacatttcatatacttatctatataataaataattaaaatagaattgtcaatttgtgaatgcccaatttattaacaaaatattcgatgagatttgtggcataatcactaattgactttttcttccataaggaacataataaattttagatatgtatttcaaatgcatttcatatactaaaaatatgaataacaggtgctgttaagatttttgtctttgtgagaaggagggatttttaatgaaagatatgttaaaaggtcagatagctattgttgccgggggtacaagcgggatgggagaggctacggctaaactctatgcccgggagggagcggttgtgattatcggcggaaccaatcccaaaaagggaaaccgtgtcctgaaggagattacagatgcaggcggggaggcccgttattatggccctcttaatgttgcaagcaaaaaaagctgcgatgatatcgtggacgctgtaatcaaagagtttggaaagatcgatatcctggcaaactttgcagggagaagctacgacggtgactcaaatatgacaccggaggaacgctatcaaacaactatggatgtaaatatgacgggaacctataaccttgctttttcagtggttcctcatatgaaggaggcgaagagcggaaagatcatcttatgttcatccaacggagcctttaacccaaccactcctgcttatgactatcatatggcaaaagctgcctgtgaatccctgaccattaatctggccatggaactggcgcctctgggaatccgggtaaattgcataaaacctggtcccattgtcaccccgttctgggatgagctgtttccgccagaggaaaaggaagctatggaggcggcttttcacggaattgcaaccagagaggttcccctaaaccggatgggaactccggacgatattgcaggtccggccttgtttctggcttctgatttatcggcatatattacaggcctgctgctttatgtgggcggaggtatgggatacgtctatgcccacggacagtctgcgattctgggcaacgtaccccttgcgggggaaaagtgagagaaccccgcataatatctgaacctgttcctatgccagcggaggttttatagatgaatgatgcgagcaataacaagcaaaacaattatggaaaagtagtctgcggtatcctcttttttgcgctgatggtgggaaattactttcagtatcagctttctccgttagccggccagttaatggagaatatgaatctgacacagaatcagttttccagtatttttacctcccctatggtgacctccatttttcttggcattattgccggggtgcttgtagacaaatttgggagtaagagggttattatggtcacgctgattatttctgccgccggactttgttaccgtccctttgcagatagttatgcaaccctgtttttcagcatgatattagggggtacaggaatcacctttttgaatgtaaatatgtcaaaaataatcgggggctggtatcctcctgaacgggttggtcccatcatgggtctgattatggcgggaaatacggttgggatgacccttgggaccgccacaaccgcaatgctcccatcgatccccacggctctctggatctccggggctgcctcagtggcggtagctgtgctctggattctgtttgtaaaagaagggccctacatccaaaatgcagggggcggttccggggagtccctcctaacctctctgaaaccggccctgaagagtaagaacatatggctggtaggcctttgcctggcctgtatcctgggatgtaatatttccctggcctcatttctcccaactgcgctgcagtccagggggatcagcgcttctatgtccgggattatcgcgtctattatgacagtaggaagcttctgcgggtccttcttcggccctaccgtcatagccaggatgccccgcatgaagccggcgctgattggatgcgcggttctggcagccctgtgtgcggccttcgggtggatggctccgccggttttggcggcggtgattgtatttctggcaggtatgtttatcagtgcgctgattcctacctttatgtcctttcccatgattcttcctgagattggcccggcttatgccggcagtgccgggggcgttattaccacgctggaacttctgggggcggtaattattcctacttatatcatcacaccggcagcgggcagcaactttagcctgtactttattatggcgggggtatccgttgctcttatgtcagtatttgcgattttccttcctgaactgaataaaaaagaacaaagataacaggatcaatgcttacagccgaaaggcacagttgacaaacacttttgtaatgttatactttgatcaggatgcagacgccggcagagaagcgcttcgcttctctgccggcgtcgatgcggcgaaaatattagatgtgacaaaagcagggaattgactatggatataaaaggaatgctttattttatcagtgctgcagaaaacctgagctttacaaaagcagccctggaaaagaatgtgacacagacagccatcagtctgagtatatctaagatggaggaggagctgggatttcagctcttcacaagacagaaacgatccgtgcagctgacagaggccggcaaggatttttatgagaacattgtggatgttgtaaaaaaatatgaagaggcagtagagcatggtatgctgactgccgccggaaaggtaggggagatacgcctgggggttccggactttgccatcgggatgagtctgacccagccccttcgcagattccgggaggcttaccctcagatcaatatcaaatctgtaattatcccgccccataaaatgatgcaggcaattgatgccagggaaattgacgcggccattggctttcctcaggaatttgaggctaacacggctctcactcatcgggtattccgcagagataagctcatggttgctatggcaccccaccatcccctagcttcctgtccggcacctaccctggagcagataagctcttataccgttactgtggtgcacccccagaaggcccctatgatctatctttatatgtgcgggctctgggagaaagcgggctttaaaccccgaaatgtaattcattcgccaactcttgacgatgcccttcttgaggtggcgctgggcaatgccgtcatactgattacagagcaaagctactctgtctacaacacatttctcacctacagccctttaaaagaattggaggggtataacaccgagatagctatagcctgggggaaagaccgggaaaaccctattattaaaggattggtttggacgcttctggaacaatcctgacaggtatgaaaaggttctgctgatccagagccttttttgctttgccggcaggtttgttgatattccaactctgatttgatataatcataagaaagcaaaagcagggtataaattttgaaaacagatagggggtattcctttgccgttacatatgtattggggcctggggctgctggtgccggtgtgctgtacactgatatatggttatgtgtcccgtaaggctttggaggcattggggtaccccaacgcctcctctgtctggaagcattttagcaggtgttttttttctgtgctgttgtttaccctttggggaatgtacaatattccgcttccagtggtatacatcctggcttatacggacaaagtgttccgtctgctccgcaaagaggagagccgcgcaaaggaactgttcctgattaactttacccatttgaccactatggccctgcacatgattctaatcggggtattctctctcatcactcatagtcagatgtatgagcttttgcagcagcctttctggcgtattctcaccataggcttggtgtttactgtgaacagtgtggctgcagggatgattccccgatggaatatagtacttgaagtgctccgtacccaatcagaaagtgcggaagcgcggccttttatgatatttctctggttctgcaatgcttttttgctgctggacagtgtgctctgtgtctcaaagattgcgtggggactgcttcctctgtttctgattggaagtacagttttgctggaattctaccttatccgttttctgaggcatctctatgctgtcttaaagaagcattacctggaagaagagcactaccggctgatagagaaattggaacagcaggatcgggaggcggcagtcttgcggagcaaaagtgtgctggatcctatgaccaatatatttacccgccgctatcttgtagaaaaaatggagtcgctgaaagcggcaaaggaacctttctccttcgtctatattgacttggatcacctgaagcaggtcaatgacagggacgggcatcacgcaggggatctctacctgatgcggtttgtgcatgagtttggctctctgctccgcagggacgatatattttccagggtaggcggggatgaatttgtggtgctgcttcccgggtgtaaaaaggatgcagcggcaaatcggttagaggacatccgtatgtatatggcaaagaagtctgattcctgtatctcgttcagctatggcgtagcctatgtttccgaaaatgccggggacagtacagagcagatcttccgcagggcggatcaggaaatgtatctggataaacaggcaagaaggcgttaggagaggaggcggtcctatgttattgctattgctgacggcggcggcctatttttattatcactggcagtactttcttctggtattccatatccggaaaatgccgtatccccggatgggtcttgtgatcctcggctttctggtgaattacctttttttcatcatctgcagtattttggaatttcatctggtcttaaattggcttctgtttgcatttttgctgttttttgaaacccttttttgctttaaaggagataaacgctgtgccctgtttcatactctgacagggattatctgcggacttgccgcgaatattttctgccgcagtattatggcgattctgatccagcagcccatgcataactttgacaatcatatccggagcagcggcaatgtaaagggggtccctgtactgctgggttttatactggcaggactcgtcctgcagtttatgagaaaaccggtaattatacgcagattccgcctgattttggatcatccgcagcattattcctttatactggagatgatgaccggattgtttttctatctgtttatcaatctgctcttgtattctgccacactcaatgacctggttcttaaaatatggagcataaaatcttgtgttttttccgttgcagggttttatattgccatacgatatacctggaggatctgtgagctggacaattaccgggataagaaccgaacgatggaagcaaaattgagagaacaacagctggaggaggaacgactgaagcatcaggcgtccctggatcctatgacaggactttataacaggcagtatgcggaagagactatcgcatctatgatggaacagaaggtgccgtttactttgtgctttctggatttggacggactgaaaagggtgaacgacgcctttggccatgaggagggggatcgctatatcctgaccgccacaggagagataagcagtgcctgccggaatcgggtggactccctgtaccgttacggcggagatgagtttctggtactttttagggacatgtcagccgatattgccgggaaaagggcggagacaattaatgagagactgcgggcggccgcagcggataaagctttgccatattccatgtctatcagctacggcattgtggagagtacagaattttcggaatggagagcgctcctgcaggaggcagatcgcagaatgtacaggcaaaagcaggaaaagggaatggcacggtatagatagaaagaatctggagggatttccgcctccagattctttctatattaaacgatatcccagggattcatgggtattatatctcttcctcctcagccctgcaataggcacaggggtcatagcttgaagctccgcggcagtccacaaaagtctcgcctacagctacggatgcaccgaaattaataggaacttccacacagagggtttggctgatggttaaggtacatatgccatttactgtaccggcgcatgtagtatcacccggtatcaccacaggttccccacagcatctggtacacggaacccctgcatgggcaaagggggttattgttacaggaacacaaacgtttacttcctgatagccggtagcaggacaagtttcattcagctgttcaggacaggcggttatgtctgcagaacaattgcaggtcatattttctgacattcggatttctccttccataaaggactctatataacatatgaaaaggaagagaattgtgtgagtggggggtacaatcacgactgccagtccgcgaaagaacagaaagccaattgctgttaaaaagaatcaggaatggtattggctgagttcgcagcaggcggaaaaatataatcacagcctccttgtatctttacactaaaagaaatataatagagctctgaagaagtgatacgaggattatatatcttccgaggaaaggatggtgtaaatgaaacggatatttttggttgaggacgataaagcaattgcgaagaaccttgagctgctgctccgctcggaagggtttgcggtacttcatgccgctacccggggggaagcacttgccctgcttgaggggaatacatttgatctggcactggttgatatctccctgcctgacggtaatgggttcacagtatgcacagagatcaaggagacccaggatatcccggttctctttttgacagcatccggagatgagtccagtgttgttacggggctgaacataggggcggatgactatatcaccaagcccttccgcccccgggaactaattgcccggattggcaccgctctgagaaaatacgggcggtcaggtacagattttgaagtctgcgggcttcatgtagatacggcaagcggagtggtgaagaagaatggcagagaggtcttcctttccgccctggaataccgccttctcctggtgtttgtcagcagccccaaaagtattatcaccagaggcaggctcctggacgaattgtgggatgcggcgggggagtttgtcacggacaatacactgaccgtatacatcaagcgtctgcgggagaagattgaggacgatccaagtgcgccccggattattttaaccgttcggggaaccgggtaccggttgggaggcggagatgtttcgaaatagagaggttcggcagtttgcatacttctttttcttaattactgccgtcacaatattcctggggtttatcatccacccggcggccggggttcttgccggtgtgtctgctgttttattcggaacagctttttttctgttcacaaaagcccggtataaaagcttagttcatatttccgaacaaatcgatcttgtgcttcataatgcggaccatatatatatcagtgatgcagaagagggtgagctttccattctgcaaagtgagatcacaaagatgacactgcgtatcagggagcagaacgacgcgctgagaagggaaaaggaacacctagccgactctcttgcggacattgcccaccagctccgcactcccctcacatccgcaaaccttattctgtcgctgatagagaaaactacagatgaaaaggaacggagagcgctgctgcgggaaacagaggaattgtttgtacagatggagtggctgattaattccttattgaaattatcccgcctggatgccggcattgtggctttccagagggtgccggttgatgtgaaactcctgcttaatactgcagtccgccctctgctgatctctatggaactgcataatattgaactgcggacagatgtaccggagggaatgaccatacagggagatttgagctggctctctgaagctattcagaatattttaaaaaattgtatgcaaagcgcgggggataacggcagaatcgggattgcctgtgaagataccccgctgttcggggagatctccatccatgacagcggcagcggctttgaaaaagaggatctgccccgcttgtttgagcggttttacagcggcaagaatggcgccgcggccgggtacggtattggactggctctctgtaagcggattataacccggcacggagggaccattactgcaaagaatcatccccggggaggggcggttttctgcatccgttttccaaagtgacggatctctcacggaaaagtcacagaaatgtaagccaaaagttctattatatgggtaaagtaaaataaaggaggctcacataatggagtttttacagatacaaaatttatgtaaggtttacggcaggggtgaaaaccagattaccgcactggatcacatttcccttacaatcgaaaagggagagtttaccgctatcatcggctcttccgggtccggcaaatccaccctgcttcacgcaattgcaggggtagatgtgccctcaggcggaaagatatatttgaacggacaggacgtttatgcccagagcaatgaaaagctggccatattccgcagacggcaggtgggcctgatttaccagtttcacaatctcattcccaccctgaatgtagtggaaaatatcaccctccccattctgatggataagagaagggtaaacaaagaacggctgaacgacttgctggatctgctggggctgcaggaacgcagaacccatctgcccaatcagctttccgggggccagcagcagcgggtggctattggccgtgctctgatgaacgcaccccaggttatgctggccgacgagcccacaggcagcctggacagccggaatgggcatgaaattattaaactgttaaaagaaagcaataaaaaatatgggcagaccctgctcctcgtcacccatgatgaaaatatagccttgcaggcggaccgcatcattggcatctcagacggcaaggtggtgcgggatgagaggcaggtggggcttagatgaacatctttcataaagtggccttccaggggctgaggaagaaccgtacacgtacgctggttacagttatcggagtagcgctctctgctgctctgatcacggcggtggcgaccttcgctgtctctctgcaaaactatatggtaaatggcgccattgcaaaaagcggtgactggcacgttgagtttccggatgtggaccaggattttgtccgggaacaagccgatgacagcagggttgccaatcttacctcctttgaaaatgtcggctatgcaatgctggaggatggaaaaaatcctgacaaaccctatgcatttatagccgggttctgtgaggataccttcgatactttgccggtacagcttgtttccggcagactgcctgaaaacagcagggagatacttgtcccggtccaccttgcggcaaacggaggtgtaaaattctcagtgggggatacccttaccctgacagcgggtacccgtcaggcgggagatgaagtactctcacagcacgatccgtaccgcgccggggaggaaagtctgacaacaggaacggagaaaacttacacggtggtagggatctgtcaaagacccgcctttgaggaacactccgcgcccggatatactctgattactataggggatgggggaaatgctaagagacgtgtcagcgcctttgctgctttgaaaaagaccggtcagatccaaacgtacgctgaggaggaggcccggggcggtgcctatgttctgaacgataatgtgctgcgttttctgggtgcttctgacgataccctgttcaatacccttctctattccacaggcattattgtgattttgcttgttatgctgggttctgtctttatgatttacaactcgttcaatatttctttgaatgaacggacacatcaattcggaattctcatgtcggtgggagccacggcaaagcagctgcgcaattcagtgctgtttgagggaatttgcattggtgtcctgggcattcccctgggtattttaatcggtatccctagtatcaagcttgtacttgtgcttgtggccaggaactttgcaaatgtgctctacgataccgttcccttaaccctttgtgtttctgctcctgcgctggcagcagcggcagctgtcagttttattaccattttaatctcagcctatattccggcaagaaaggcagcgggcacacctgtgatggagtgcatccgccagacgaatgagattaaggtagaggcgaaagctataaaaacctccagattgctggaacgcatttacggccttgaggggacactggcattgaaaaattttaaaagaaataagcggcgctaccgcagtattgttttgtctctaacgttaagtgttgtgctgtttgtatcggcaagtgcttttagttcatgcctaagtgagatgggagagcaatcggcggtggaggcagacggtgatatatctttctattccgcggatatgggggaaaacgaagcgctccggctgtatgacgaactgaaaaccgcaggcggtgtaaccagaagtacttatcaggcggtatccgcctatacctgcacagtaaaaaccagtgatcttaccagtgaattcctggacagctgcggggaggatacaggtatagacagggagagtgacacagccgggatgatgctggacgttcaatttattgaggatgatatctaccagagttttctggaaagcctcgatctccctggcgaagagtataccgcacaggacggaaacatgattatagtaggtaaaaagatggtagattccacgattattgatgtgttcagagaccggaccatggagtttaccctgggtactgcatccggggaacagacaaagacgatccatgcgtcctttgtggatacctacccgttagaccccccgccggcggatccgggcgaggtgaagggctatgttcttatggtgatcgccccttaccagatgaagccgcagtttgacgcattgagtgcccccacaaagatggcatttaccttctggtcggataatccggggcagtctgcggcgcagatgcagaccatgattgacagcgcaggcactgccgtggattatactctgtacaatcttcataagatccttgaggaaaaccgcaatgtctccttcattgtaaacttatttacagttatttttagcatcatgatcactctgattgcagtggcaaacgtattcaacaccatttccaccaatatcaggctgcggagaagggaacttgccatgcttcgttctgtgggaatgcctgaccgggatttcaataagatgatgcgctttgagtgtgccctgtatggtctgcggaccctgctgtttggcctgcccatctcagggctgctttcctggctgatttataagggtatggtactgggcggtgctgagattgcatataccttcccgtggagcagtatggcaatcagtatcctcggagtatttttagtaatatttattaccatgctgtatgcggtaagcaagatacgaaaagaaaatatcattgatgccctgcgggacgatatggcctgatgggtaagcgctcaggtcagtatcgtctgtccgccgccagacgatatgggattattacacgggaggaggcaggcaacatagaaaaatcatttcccttccgctgaaaagttgccaagggcagcagaactctggtatagtggaaaaaacggcagataccacaaaggagacgattatgcggctgaacatgcacattctggcggagcatttccggcgtgaagaggtattggattcacatatccctgacactacggtattagatttaaaaaatatacgtaaatatacaccagagaagaaaccggactgggagaactatgtgtacctgatagatggggaaatcagacagaaggactggtttgccgggtgggatccgtggtctgatgacaagcatatgatattcctcaatacacaagacattcccgaagcctggagggaagagcagtggattcttctgaagaccgggacgtgtgcgtcggaagttctggaaaggattgcgggtgtatttgaatggttccaggaatgggaagaacggcttttgcgtgcacagatcgcagggacaacgctgaaaggtgtccttcgtattgctgcggaggcagtccccaatccaattggcctttttgacagctctaccagttgtttgggctgggcgggagagcttcctgaaaaaagagatgccctgtgggagttggctgtgggggagaaggttaccttttcctccgaaatgtatcagctatacaagaaattggggatactggaagatgtggagggcagaaaggctgcggcaatctaccgcctgggagatgaaacctggcctgattttatgaatgccaatatctatgatgccaagggtaagacaagattgggcaatctcggaacaacaggcttgaacgcccctatgacggcagggcagttagctgtttttgactatctcgcatcctatttatcaccaattctggaacggtatcatcagacattatatgatgccaggaagcagaattttattaactgtctggacagaaaaccggttagcaaagaatacttttggaatcgaatgtcagcaggtggtgtctctgacaaaagaagactgcatattctgtatatccgacagcttaccggagacggggaagggctgtattcgttagaggctctggaaaccaggttgcagcggggatttttggagcagaagaatatttttgtgtcctaccataatggcattgccgtgtttgcctgtgacttggacagcagtgaaaagatggatgcgtggattggacactttaggaaactcgcaggggaggtacaattttgcataggtatcagtgagatgtttgacagcatagaagaaatcccggatggctataagcaggctgaaattgctgttgggtatgctttaaacaagaagaaaaatggggctgtccgctttagagaatgcatctacaagtatgcagcccgtaaaataacagaagacttatccataaaagccatatgtcatcctaaaatctacgaaatctatctctatgatcaggaacatagaaccagctatatggaaacactgcatgcatatctggaaagcagctgcaatgtatccaaaacagctggaagactctatctccacagaaacacggtgaattatcgattggaaaaaatgcgtgagctctttggcgataagtttatagaagaatctccgggagatatgctgttttctttaaaaatattaatgaattagtagcaggcaggtggaagcaggcatttccacctgcctttttgtgcatgattgcacaaagaaagcagataaaataaaacaataacagtatccagagacgatgttttccccttgcattctatttataataaagtcatcaagttacatacggcgccgatgatttatggaatcagaaataaaaattggaagatgctagtttggaggtaactgtttaatggaaactaagaatcaaaaatggctggtatttgctgtcttatgcctggcgtatatgccggcctcctatgcacagtatcagctttctgtatttgcgccggatctgatggcggattatgggctgacaacgtcacaattttcctctgtgttcacttcacctatgcttgtggccatatttttgagttttgcgggagggattatctcagacagattcggagcaaaaaaggttaccagtattgcgtttgtactgacttgtatcgggctaattggcaggatttttgcagggagctatctgccgttctttctttgcatggcattgacgggtttttcccagatgtttgtgaataccaatgcatctaaaataatgggaagctggtttgaaccgaagaaagtggggatgctgatgggtgtttttgcactatgcggccaaatcccgggagcatttgccacggctacaacagctgtcttatttcccaatatgaaggcagcctacggggcggcagccgtgtttggcgttctggtttttgcactgtggctactgtttgtgaaggacagaccgggtacctctggggaacaggaagtgaaagaggaaatctcagaaaagcaggcttccgttagggagtgcctgggcgttgtgctgaggaacaaaggaatctggtgtatttctgtctgcatcatgatgatattgggctgcaatgtgacattatccacatttttaccgatagccctgcagaagatgcacgggttggatctggcggtgtgcggcacaattgcatccatgatcacactgggtaactgtgtgggctcaattacaggccccattatattccagaaggtagggagagtcaaaaggtttgttccgggaattgcagcgctgtctttcgtgagtgttctcatatgctggcggtttgattccgtgctgcttctgtacgcgttctgcttattgacagggacgcttctgggtgcggctatgccaatctttttttcagcgccgattctactggaaggaattggaattaggtatgcaggcagcgcggcaggggtaatagcaaccttgcagcttctcggggctgtattaattcccacctacattcttacccccattgccggggaaaattatgggctgctgtttagcttggcggcactgtgcatgctggttatgtttgtgtttgggcttttgataccagagtttacaacatctaaggaaacaatttaaaaaatctatataggagggatattatgacgaaaacaatcaatgagggcgtatatacctttatgaattccggagggatgctggttccctttgtgtatgacggatgtaggacggattttgcggacattcaaaataaaaaagaatgtggaggtaacagacaatggcaaagacaatttttgaggaaatgggcggcaaatacgaaaggcaaggcgattatttaataccgtgcttaactgtacccgccgaagaagaacagccgataggcatctggggacagcggcatttggattatctgaagcatcactgcaaagttacatacaccaatcttcttacaagcggcagacttaacgcttaccttgccgacattgacagacaggcacaggaacgctttgaaaggctcatagagggtatgaaacaggcacagggcataacggaacagctaaaggcagaaaacgccttagaatggacaggatgcctcaataacataagggcttgtgcgagggagattgtggaaaaggaaattatttttgcataaacagatgattagtggcagggggaaatcctgccgctttttctgctttagtttgtcagcttgacaaataaagggttaaggaatataattagattcagtattatacaaggagttaataaatatgcggcaaggtattcttaaataaactgtcaatttgatagtgggaacaaaaagtagcagtcccgtttcacttttaatatggggcttagttttttgtacccagtttaagaatacttttatcatgtaattttatatgcccgaaaacatataagtgttttggggctattggagttatttacccagtgataggagtatttatcactgggtatttttatgcccttttttgggtgttgataggaggaaaatcacatgaaaataattaacttaggcattctggctcacgttgacgcaggaaagacaacattaacggagagtttattgtataccagtggtgcaattgcagaaccagggagcgtagataaaggcacaacaaggacagatacaatgaatttggagcgtcaaaggggaatcactatccagacagcagtgacatcttttcagtgggaggatgtaaaagtcaacattatagatacgccaggccatatggattttttggcggaagtataccgttctttatccgtattagacggagcagtattattagtttctgcaaaggatggcatacaggcacagacccgtatactgtttcatgcactacagacaatgaagattccgacaatttttttcatcaataaaattgaccaagaggggattgatttgccaatggtatatcaagaaatgaaagcaaagctttcttcggaaattatagtgaagcaaaaggttgggcagcatccccatataaatgtaacggacaatgacgatatggaacagtgggatgcggtaattatgggaaacgatgaactattagagaaatatatgtcagggaaaccgtttaaaatgtcagaactggaacaggaagaaaacaggagattccaaaacggaacgttatttcccgtttatcacggaagtgctaaaaacaatctggggattcggcagcttatagaagtgattgccagtaagttttattcatcaacgcctgaaggtcaatctgaactatgcgggcaggtttttaagattgaatattcagagaaaaggcggcgttttgtttatgtgcgtatatatagcggaacattgcatttgagggatgttattaaaatatctgaaaaagagaaaataaaaatcacagagatgtgtgttccgacaaacggtgaattatattcatccgatacagcctgctctggtgatattgtaattttaccaaatgatgttttgcagctaaacagtattttggggaacgaaatgctgttgccgcagagaaaatttattgaaaatcctctccctatgctccaaacaacgattgcagtaaagaaatctgaacagcgggaaatattgcttggggcacttacagaaatttcagatggcgaccctcttttaaaatattatgtggatactacaacgcatgagattatactttcttttttggggaatgtgcagatggaagtcatttgtgccatccttgaggaaaaataccatgtggaggcagaaataaaagagcctactgttatatatatggaaagaccgcttagaaaagcagaatataccatccacatagaagtcccgccaaatcctttctgggcttctgtcgggttgtccatagagccgctccctattggaagcggagtgcagtatgaaagcagagtttcacttggatatttaaaccaatcgttccaaaatgcggttatggagggggttctttatggctgcgagcaggggctgtatggatggaaagtgacagactgtaaaatctgttttgaatatggattgtattatagtcctgtaagtacccccgcagactttcggctgctttcccctatcgtattggagcaggctttaaaaaaagcagggacagaactattagagccatatctccactttgaaatttatgcaccgcaggaatatctctcacgggcgtatcatgatgccccaaggtattgtgcagatattgtaagtactcaggtaaagaatgacgaggtcattctgaaaggagaaatccctgccagatgtattcaagaatacaggaacgatttaacttatttcacaaatgggcagggagtctgcttgacagagttaaaaggataccagccagctattggtaaatttatttgccaaccccgccgcccgaatagccgtatagataaggttcggcatatgttccacaagttagcttaacagcttgcaaaagtcatataaaatgagatttgaaaggattagagactaattatgatgaaatgcgaatggatattgtgtcctgtttgtgggagcaaaacccgtaataaaattaggaaggacactgttttggagaattatcccctttattgtccaaaatgcagacaagaaagcttgattaaagttgacaacttgaagataactgtcatcaaagagccagacgcttaagacgcagagccgatgaaattgtggaacaattcacgaatcatcggctctttttgtttcgtatttgaaagaacaaactcaccaaataaaaaaaacgatattcgggtgggttattttgttataccctaaattaccctctgaatttgtttttaaatttggagggatttttttatgttcttttttcgggcggttattcatctgctcatacgaagtaaaatttatcaatacatagcatatcagagaatggcaggaaaccagttaaaaaaatttctgccagtgcagcggtacttctcaccttgaaagtggaagtacaatctccatacaacagaatttgtatttcccataaccgtgaaggtcacagagcctttgcggtttttcttttgtcgttttttgttggaaagtgccgcagggctgtttctggtgtgcgttgccgctccccgcctctccatctggatttttacatttcaaaaattcagattggaggtattagcggtgaaatacgcaccaagaaaagtatatatcaaagaaagcggcggctatgtggaactgtcctatacggatttctgccgccgcaggcaagccgacaagggatatatggacaagctgtttatccccgtccaaggttgtctgcttgaagtcgtaagggagcaatatgcggacttctaccgtgacagggagcggtggcgttacctgcaaaaattagatgcgaggaacagcctgctatctctggacggatttacggacagcgaggggaatcctctggactttatcgctgatgaagcggcggacattgcggaaaccgttgtcaatgctgttatggtggacaggctgaaagccgccctgcctttgttgtcggatagtgagcaggagttgatacaggcaatcttttttgacggactttccgagcgtgaagtcggggcgaggttaggcataacccagagcgttgtgaacaaacgcaaagccagaatcctaagaaaactaagaaagataatagaaaattaaaatttaaggcgttcagcccccttgttttttcctttgggaaaatgagggggcttttctctgccctctcaatcaattctgattggaggaagaaagaatggcatacaaccacggacgggaggacaggaaatggcgtatctggaaagaagcggaggaaaagctgctgcgtgagtgcggcgttgatgaagtgaccattgagcagatacgcatagcggacagggcagacttcaattccaacaggcggttttaccgatggacgaatgacgttgcggaataccttgaggacatggcagacagggagcggcaagcggaggtgaatacagttgcggagttactggacgagattgagagcgaaaatctctatcaagtattagtcacggtggacgggcgtaccttgaaaatcgtcctgctgaaaatgcaggggtattccacaaaggagattgccccacttgtgcatttgacgactggtgccatctatgcgaggttagaccatctgcggaagaagcttcggaaaattttgtaagcgtctaatacatcccattattctgcgggctactgggtggggagtggaatctccccgcttatttttggcaggaggaaaacgggatggcatataaagctaaggcgtacacgcttcgggaggaatccacggaaagcggtataaggtattttatcagttttaaggacgggcagggggaacaccacgaactggaagtatccgagcagttattctttgaatttcggcagatggaacgcaggaacaggaatcttctccaatgggacgagcggcacagggagttttcggaagtatgggacgaaacgctgaacaggcgggcgttaaagctgcctaagagcattgaggaacaaatgattgaagcagaacgggcggaactgctctgtaaggcggttgacagactgccagagatacaaaggcgacgtttcctgctctactacgagtatgagttcaatttttaccaaatcgccgctatggagcattgcaccgcttctgcaatacagaaatccgttgctgttgcaaagaagaaagtaaaagcggaaatgaggaaatatctccaaccatgaccgacaccgcccgaaaaagaaatctgttttttatttgtgtgggattggcggtattacatactctcacttttttcgtgggagtaaatctatttttaaggaggtcaacgcctatgtgcaacaaaaacaagataactgcccgaaaggaggaaacccatgcagaagttacagacagtcaacgccgaaacgctcctttatgagccgcttgagaagccgtcctttgtggtggacagccttatccccacaggcttgtcgctgttctgcggctcacagaagataggcaagagctggctcatgctgaagctgtgcttatgcgtgtcgcagggaatccccttatgggacatgacgacaatggagggcgatgtgctttacctctgccttgaggacacgttctgccgcatacaggacaggctgttccgtttgacggacgaagcgagcgggcggcttcattttgccgtggcaagctgcaagctgtcagacggtcttatcgtgcagcttgaggattatctgaaagactatccagacagcaggctcattgtcattgataccttgcagaaagtccgtacagcttcaaaagacaacgcctatgcaagcgactatggggacatctccctaatcaaagattttgccgacaggcactctctggcggtcattgtcgtacaccacatccgaaagcagaatgacagcgatgtgttcaacaaggtgtctgggacgacaggcttaacggggagtgcggacgctacctttgttctggaaaaggagaaacgggcatctgacaccgccaagctgtatgtaacgggcagggacacgccctatcaggaatacacgctccgtttccgtgattgcagttgggaacttgtggagaggaaaacgcaggagcagcttgcgaaagaaacgataccagatgtcctttttcggttggtggattttatgagggataaggaagaatgggcaggcacggcaacggagctgttagccgctatgggggaaacggaaaccatacccacggtgattacgaaatggctgaatgaatatcacaccacatttttaagcgagaaccgtatctgctaccagtacagccgcaggaaagacggcaggcagattgcccttgcaaggagggcgggtgacagcggtgacggcggtgacagcgatattgggataccccctgttactgtcattgacgcttaaagccatgtaaagttggcggctctgccctgcgggtgacagcggtgacggcagtgacagtgattttaggataccctgccgctgtcatccctacgggagaacaccccgcaaacgcaaaatgcaggcgtgggattcacccgcccttttcgggcgtgtaaaatcacccctgcggtcagaaaaatctctccgatttttccgactgcgtttacagggtgtaacacactacactttgccctgcaaagagccgtgtgccagacgttccctctggactcccttatggcaggtcttacgccctgctatcctacgccttgcggcttcggataaaagaacggcggcatgacggttacagctcttgcgagggagtatcccaaaaacaccgtcaccatcgtcatgaccgtcatgcaggggataagggtgacagttacggcaatcggcagggggcatcccaaaactgccgtcaccaccgtcaccgctgtcacccaaagggcagttacccgccgaagaaaggaagatgatggattatgccctatgcaatcctgcgtttccagaaacgcaaagcgggcggcgttgcggcttgcgaacgccacaacgagcggaagaaagaagcctacaaaagcaacccagatatcgacatggaacgctctaaaaataactatcatcttgtcgcaccgccaaagtacacctataagaaagagattaaccgaaaggtagccgaagcagggtgcaggacaaggaaagacagcgtgatgatggtggaaacgctcatcacggcttcaccagaatttatgaaccagttaccgcccgaagaacagaaagcgtattttacgatggctctggatttcatttcggagcgtgtcggggagcagaatatcctctccgcagtcgtccacatggacgagagaacgccccatatgcacctctgctttgtgccgattacaccagacaataagctgtccgccaaaacaattttaggcaatcaaaagagcctgtcggagtggcagaccgcctaccatgagcggatgtcctcacgttggaatcagcttgagagaggtcaatcttcgatggaaaccaagcggaaacacgtccccacatggctctataagttgggcggcaggcttgataagcagtatggggaaatcgtgtctgccctgtccgacatcaacgcctttaacgcagggaaaaagcgtgacaaggctctggaactggttgccgcatggctgcccgaagtggagaaattctctaaggaaatcggcagacagcaggcgtatatcgacagcttaaaggagcaaatcgggcaggaagccgactatgcagggcgtatgcgtgatgaaaagtacgagcaggaattaaaggtgcagaaagccaaccagaggatatttgaattgcagagaaccaacgagcagatggggcggctgctctcaaagataccgccagaagtgttggaagaattacagagaacaggcagaaacaaatcaagagaaaggtaaaaagtgaatgaagaaacaggattttaaggtgttaaagaccaaagatttatacccgtttcccgacaatccgtttcatgttgtggaggatgaaacgctgtcagagttagcggaaagcatcaaggaatttggcattgtcacgccgataatcacacgcccgaaagaggacgggaacggttatgaagtgattgcggggcagcggcgtgtccgtgcgtccgaacttgcaggtataaataccgtgcctgcatttgtcctgcccttagaccgtgaccgagccatcatcacccttgtagacagtaatttacagcgtgaaaatatcctgccatcggagcgggcgtttgcctacaggatgaaatccgaagccatgaagcggcagggtttccgcacagacttaacctcgtcacaagttgtgacgaagttgcggacggacgacaaagtggcacagggcttcggcgtgggcaggatgaccgtccagcgttttatccgcctgacggaactgataccgccgattttgcagatggtggacgaggggaaaatcgccctcacacctgcggtggaactgtcctttttgaagaaagacgagcaggaaaatctctttgccacgatggagagcgaagaagcaacgccctcactctcacaggcacagcggatgaaaagcatgagccagagcgggcagcttgacatggatatgatattttccattatgacggaggaaaagggaaaccagaaagaaaccttgaaaatcaacacaagcaaactgaaaaaatactttccgaaggacacaacgccgaagcagatggaggaaaccatcatccgacttctggaacgtgagttgcagagaaaacggagcagggacagccgctaaccttcttttttcgggaagtaaatgcaggaatttggaacagaagaaagacagaattttaaggagaatgaggtaaggaatgaaagaaatccagtatgagattgtaaaggaaatcgccgtattgtctgcgagtgacagcggctacacaaaggaaatcaatcttatttcatggaacgggagagagccgaaatatgacatccgcagcttttccccgaaccgtgagaagtgcggaaagggtatcacgttgaacgctgatgaagcagcggcactccttgaagcattacagaaagaagtaaacagcggggattgatggtatctgattgacagggcggggcgtttccagacgttctcctgccctgtctggaaaggaagatttaagtatgggcgaggataggaaaacaactggaagaagaaagcgtattgtgccaaaagggcaagtacaaatgattatcagtcgagaatatatcggcacacagaccgttgcagaagcgtttgtcccgattatctccgaggatattcggaagaagattgccgagggcgacaccttcgacaatgaggggctgtccgcttagaatgtacgcaatggaacatgaaaacgttaggacagatatggaggttttacagtatggcaggaataagaacggagaacaagatttatgaagtcggcatttactgccgcttatcaaaggacgatggcacggataacgagagtgcgagcattgcgacacaaaaatccatcctcacggattatgtgaaaaggcagggatggcatttagcaaaaacgtatgttgacgatggctactctggaacaaattttgttgaggtaagataacgataccttttttgcagagggtgttatcttacctctttttgatgtatgttagatagcataactctttacgtcggctcctatctgtctgaaataggagatactttcagtaggcttgtcgcctgtatcaactctgccgacaaagctataaaagatttcgattttgcgggtgttcgtttccttatccagttcgtgaataagaatacggtcaataaattcatggacgttttcgtaggtcagttcttcaatcgctgtgtatctgcgtaccagtgcgacaaacctttttacgtccgcgctgcgctcggtggcgttgtcgatttcctgtgacagctccgcaatcctccgggtcagcgtctttttttcttcatcatagccggaagtcagaaaagcaaattgttcatctgaaagtttccctaaagcgttgtcctcgtagagcttgcggaataagatgttcagctcgttaatacggttctgcgccttgtcaagttctttccgctgctgtgtcagcgtcttttgtactgcctttgcgctgcactcgttggcggtttcgataaactcctgttcatgctctttcacataagacgttactcgctgcaagtctgcaaggacaagttctttcaatacgcttttgcggatataatgcgtagtgcagagcatatcatttcttgcccggttgcggtagttgccgcaagtgtaggcgtgtttccgttcaagcgtcccggctccgcgtactgcatacattttgtagccgcagtccccacaaaagagcagcccggaaaacaggtcaatttcatcaacctttgtcgggcgttgccgggtggcaatccgcttctgtgcaagttcaaaggtttcttcatcaatcaaaggttcgtgagtgttggggaagaaataccttttttcctccgggttctttttcgtctttttcgacttataagataccttgtaggttttcccggttatggtatgccctaaatactctttccttgtcagaatgtcgtacagtgtcttatccggccagttgtaccatgcgttgagctgtgggcgggggtggcgtttgctccctgtcctgcggtagcgcagttccccgacggtcaatatctcattgtcccgcagccagttctggatttcacacatacggtcgccccgtacatacattgcaaaaatctgttttacgacgtgtgccgtttccgggtcgggtatcagatgattgcggttatccgggtcgataaggtagccgtaaggagcttcgccgttgacgcgctcgcctttctgtgcctttgcctgtttgacagcccggattttctttgaggtgtcgcgggcgtaaaactcgttgaaccagttccgcagaggggtaaactcgttatcttccctcgctgtgtctacaccgtcgttaatggcaatgtagcgcacttcgtattcggggaaaacaatctctatcagttcgccggttttcagataattacgtcccagacgggaaaggtcttttgttatgacggtcgccacgttcccggcttcaacctcatgcagcatggcttgaagcccctcacgctcaaagctcacgccggaaaatccgtcgtctacaaaaaagcgtgtgttgaaaaagtggtgttcgtcagcatacttttgtaaaatcagtttttggttctgtatgctttcgctttccccggcttgcatatcttcctggctcaatctgcaatataaagcggtaatcttgtctgtctgtaacattttgtcctcctttccgacgacagacaagcatggtatttgtactgtctatattataccacataccgctgcctgtgtcatgtataaaatgtgaagaaacgccctatttccgggcgtttgcggggttcagctccatgtccttgcgaatgagcttctttatctttttatccagtgtgtccgttgcgcgttcacttgcggacgaacatacaaggtaagtaacttttccgattttatgctccgttgtggtaacgggcgtctggttttgcgtcaaagaaaatccccctttctttcgcaaacatataatacagtctatgaatagcagcaagtccactattcaagaaaacaaaggctttaatcggacggttattagcataacctcatgggaatttcaccccggcatggttctcatgcagccctacccattgcctgcgacgctcttaacgctcggactgtggctgtaaggaagtatcattgtatattttgcgtgtcgtcgcccgcaagccgctacacttgctttccggcgcggtgttggtcgctcggctgtccgggcggggataacctcacccggatagcgtcatggcgcacccaccgtatggctcggcgcaaaaggaacgtatccgatttgccctatgctgcgccgccgttatcttgcgccgctttctttgtcaaggttcagaatggctttgctgccgcgtcagcagcggaacggaaaagggggagagagaaagcgtcccgccgctgcggtttattcctctgccttaaaggtgaggacagccatcatcagttttgcttgcagccgttcccgaatgtcgtggtctacgccaaaatagacgttcccgcgctcgtcgtacagcttccgcatggagaggcgggctatgtagccgctgaaatgctgcaagacaatcttcatagcgtccgggtcgccctttgtcgctgccaaaatgacaggatagggaacaagggctttttccgggtagccgggttcgttaccattcgtcccattcatcagcattttcctccagatatttttttagcagctcaaaagagcttgtccgcctgtactgtatcgtgcttctcgacgtatcgaacagctccgcaatctcggtgtcgttcattccctcgaaatagtacaggagtacggctttgcgcttttcttccggcaaagtacggattgcttcaagaagcagcttcggcgtgattttcttcccggctctttcaaaggcgatttcccctttgaaatattcatcaaaggtatgaagctgccgcgcttcttctaaggtcaagtcggaaaaggtaatctcccttgccttatgcctgtgcagctctttgtgagcgtcacacgcttcattgtgcagtaccgtattacaaaacttctggaaagcgcactgttttataaactccctgcgattaggttccacattctcaccccctttctcgttggaaagttggtggtgcttcccccttttcgcggggcaatactgccttttgaaaaaaacgccgaagattttcggatttttttcaaaaaattttttgagcagcaaaatacgcctgtccgaaaagcccggacagacgtataggtattgtaagcggtattcagatgattagacagttcatattgatagacgtagttttccccggcggtggtcgggctttttttgatgtgtcaatgaccgtcggattttgtcgatatggtatgtgcttcatggcggctacctccttttagccgccgcttttaacagtgataccgcgtcatttcattagaagataaaaagaaacggcggctttggtttttcaaagctgctgcggaaatcaaagaacgacaagcaacagttctgattttgctccaatatggttattgggggcacaaattaaatcaaaaaagagccgataacagcagtatttcaaactgcatattatcggctctgcgtctgtgcgtctggctcttttaattaaattatttttgttgttttttggctttattatatgtattagctaactgtccacaagctgctttaatctctctaccatgagaaactctcatggtaacttcaagtcctgtttgctctaattgatgtttgaacgcaaccatttcttgtttttgtggtgctctaatttttgaattactcgtcgggttgtattgcagcacgttaatcataacatttttgcccttaaaccattttgcaagttgccttatatctgaggaacggtcatttatacctggtaaaagcaaatacgcaaataccacttttcgattatgcctttgtgaataggacaatgcttgcttaacaacatcttcaatagcgtacatgtgcatatgaggaatgatgcagtttctcgcagcctgtgttgctgcatgtaaagatattgtcaactgaatttttagatgttcttcgcgcaatttttttaattgattaactggaccaactgttgatacggtaatgccgtcggttggaaagttaagtccatttctatctcgaagaatatggattgctgcaatcaagttgtcgtaattgaataaaggttctcccattcccataaaaacgatacgatttactttttgacgtatcaatatgacctgttgcacaatttcagatggtgttagattacgaacgaaaccattgcgtccggactcacaaaaaatacagccaacagaacaaccaacttgcgtacttacgcaaacagtcccaccatctcgccgtttaataaaaaccgtttcgatatacctgttgtctttcaattcataaacatacttttcagtatcgctacttttatagactttttttgttgatattgatagattttttttgtgaaatggctgtttatacaattccgcatataaggctcttgctttatcctctccaattacttccgacatttctttgtaagtaaatccgtatgggtcattcaatatttccgtaagtgtacttttaggtaagtgtttcatttaatatccttccttttgtttttcagagtttttgattatgatttctaatttttcaacatcaatgatatgtgttaatttacatttagggcagaaaagaggaaaatttcttaataccgtattataaaatacttgaaccctcgtctttccgttacaaattggacattttatccaatatttttcaagcataatatttctccttttgtgcaaaaaaatacaggtcaattctcaacatgagcattgacctgcatttatacatataacactacaacaaaattaaggcatagtttttatactatgtctatacatcgttagttttgttgtatagcatacgcaaaataagcatgacaaaaaagcccatattgaaaatgggaaaaatcttttttgatttcaatgcttatcgaatacgcatgctatgtaacataaacatttcccccttttaataatactatacaaaaaaagcggctaattgtcaacatatacatatgaattattttggctaactgattgaattgtgtagacatatccaagaagaaaggggaacagtaaaatgtaacagggtgaataactatggcaaaaagaccagtaccgaaatacgatttcaaggcttttggggcagcgataaaggcggcgcggacagggcgcaaggagagccgcaagaaagtgagcgacgaaatgtttatctcgccgcgctaccttgcgaacattgagaacaaggggcagcacccaagtttacagattttctttgagcttatgctccgctacaatatatccgtagaccagtttcttttggaaacgccgccagagaagaacacgcagcggcggcagcttgacgcgcttcttgacggtatgagcgatacaggcatacggattgtgagcgcaacggcaaaggagatagcggaagtcgaaacagagggcagataagaagtgtccgtcagaattgaataaggtttagagagcgttgtaatctttttttgaggattgcagcgtttttcttttgcggaagtttggcaaaaccgggcatagctccgtagtaaggcataagggataaaaacattcgtagcaagcataggaagcgggtacccacttccgtattttcccctcccgcgctgcggcgcgtcggttgaaaattgcttgttgggaagtgtcccaaaccctcggaacggaaaggaaaggagcgaatacatgaacggacgcaaaagaacggtgcaaatcaaattcagagtgacggaagcggaacgggatttaatactggaaaaaatgaagctcgtacccacccggaacatggcggcatatctgcggaagattgccattgacgggtatatcattcagatagaccatgccgatataaaggcaatgaccgcagagatacagaaaatcggtgtcaacgtcaaccagatagcacgccgcgtaaacgcgacggggaacgcataccaagaggacatagaggaaataaagggggtgcttgcggagatatggcggttacaaagattaagcctattaaaagcactctaagcaaagcccttgactatatcgaaaacccggacaagacggacggaaaaatgcttgtgtcctctttcggctgctcctatgaaacggcagatattgaatttgaatataccttgtcccaagcactccaaaaggggaacaatttagcctttcatctgatacagtcctttgagccgggggaagtcgattatcagaaagcccatgaaatcggaaagcagcttgccgacgcggtaacaaaggggcagcatgaatatgtactcacgacgcacattgacaaaggacacgtccacaatcacattattttctgcgccgtaaatttcgtagaccaccgcaaatataattccaacaaaaggagctattacggcatacggaacatgagcgacaagctgtgtcgggaaaatggcttgtccgtcgtcgttcccggcaagggcagcaagggaaagagctatgcggagtaccaggcagaaaagacgggtacaagttggaaaggcaagctaaagattgccgttgacgcgcttatcccccaagtttccagttttgaggaattgttgcagcggttacaggcggcgggctatgagataaagccggggaaatatgtgtcatgccgcgcccccggacaggaacgcttcacccgtcttaaaaccctcggcgcggattatacagaggaagccataagggaacggatagcgggcagacgggcaaaggcggcgaaagcccccagagagcagcgcggcgtttcgctgcttatcgacattgagaacagtatcaaggcggcgcagagtaagggctatgaacagtgggcgaaaatccacaatctgaaacaggcagcaaagaccatgaatttcttgacggaacataagattgaacagtacgcggatttagtcagccggattgaagaaatggcagcggaaagcggacaggcggcagacgcattgaaggacgcggaaaagcggcttgcggacatggcggtgcttatcaagaatgtttccacctaccaaaagacaaagcccgtctatgacgcataccgcaaggcaaggaacagggagaagtaccgcgccggacaggaacaggcgattatcctacatgaagccgccgcaaggtcgctgaaagcggcgggcattgcaaagctcccgaaccttgccgcgctgcaatcggaatatgaagccctccaagcgcagaaagaagccctttatgccgactatgggaagctgaaaaagaaagtccgggaatacgatattatcaagcagaacattgacagcattttacaggcagacaggcagccggaacgggaaaagggaacagagcgcggataaggatagcaaaatccccgccgctgtgctatgatagggctatcaaaaagcagaggagcgttgagcatggaaaaccagaaaatgccggaatatgaaaccatacgcgccgccgttgccggggaaaaatgggcggtggagaaagtcgtggagtgctacaaggacgaaatcgacaggctatcgacggtagcggtcagacagccggacggaagcacgaaacaggaaatcaacgaagatatgcgccagtccatcacaaagaagctgatagaagccctcccgcagttcccgcttgaagaaatggaaaagggaaatgtcagataggcaaaaaaagaacagggcgcggaagccagtatatgacttccgcgccctgtctttttatgggtgctgttttcgtgaatgttacgcagtagaacgccatttttgggggtaaaggtataaagtatcgcctatccgattttcacgcccggaaagccctgtaaatcaagggattttccgcgcctactgcgtaacaggggcgcgtcttttcctcatgcgctcggcggcttgtctgcgggtgatacgtttccggcagacggggcagtatttgacactgttagaggttgacgcaaagaacgcgccgcactcggtacatttcttcttatcccctgtctggtaaagctccgcataaagcagcctgtcggcgggaagcaccgcaacccggaaccacttgcagagaagcgaataggaaatgagctgcggacatacgcactcgtccccgtcgtccagtaagatacagttcccgttatcataattgcagcacgtccggcgcacaagggcgttgactttccggctctggggcggcgtcagccgcttaaccccgttcatacttcatcagcggcgtaaatgggaagctctgcaaattccgcttcggtcaaagcgtccactttggaaagggtgcgctttgcaagctcccgcatatccgcgtccatgtagggcagcgcggcgttgacattctcaatcaaagcccgcttgccgccctcgttgtaaatgctcaaaaggtttgtttcttcaacagtcagtctaatcatgctcatacctccatatcgtgattttttgtttttgccgccgcctttttcggggcggtctttgccttgtctgctttaagctgcgcccggatagaggggcggggcttccttatctccctgtcccggttctcccccttgtcaatcagcgcatacgtcccatgtctgccctcgattttggaaaaggaaagggtcttgtagggcagcatggagaaaaggcggtcagtgtcctttgtggctgcaagccgcatgaacgccggggaaagctctgccatgaaatgggtcttgttcgggctgttcggctcgtaatgccgcttcatttcccgcacaatgcgccgcgcttccgtttcaatcagcccgtcccgcaaagcggcaatatgcgccttgaaatcccccggcgaaagctgctcccggctgcgccgttcttcctgtaagagcgattgcagcgcgtccgggtcgttgggtacggcttcaaagcgttcaaatttcccaagctgcgggtctggggttccgtcaaaatatctcccggcttcctgtaccctttccccatgctcataaatcagcttcaccgtatcggcgggcagctccttttccttgacgcgctcataatgtttagagtagtccagttcgtacagattgcccttgattttcccgcgctcctttcccgtcagctcgattgcataggcaagaacgcggtcgcttgtctgctccatgtagaaacgccatgtgttgtggggcgcggtgtctttgaggaaaacgtcgcgctcccggaaacagtgcgtcccggacgggcggcagaaccacaaaagtgttttgtcctccctgtgggggcttgccgccgcctttgcgataatctctttgtcaatgtctaagtcgctctggtaaaagcctgtgttctgcttcataatcgcttcaagggaagcaaacaaatccatgttttcaaatttgctctgttccggcatgggtcagctcctttccaagtcctgtgacttctgctttgcgtttttcttctgtgccttttccttgtcggctctaagctgcgcccggatagagggtttcttttccggcttcgctcccttgccgcgctccttgtcggctttgacagcgttagccaggtcaacaagggaaatctgctcgcccgcctttacctttgcttccagttcgtcaacggtgggggtgttgttgatgataccgtcaatcatgttcccgttctgctctgtggtctgctcggcggttttcaagggattgtcccgctgcgcctgttctgcggcaacggcaaacgcccgcgtcccattccccataatcagatactttccgtcgtccgactggtggtgaaagccatatccggcggcttctatctgctcccggctcatggcggtcacatggaaagtccccctcggtgtcttgacagtttcgcccgtttccaagtcgtccggggtaagctgcttttgctcctgtaaaaactccggcacttcccgaaaacctacactgtcaacgaaatgcgccgcgtcctgtccgtcctgatgaagcactaccacgtcggaaacggaaaggctgtgtcccttaaaatctttggggtggtcgatattgaaacaggtgtaaatatcttcaagggaagtttccggcgcaaggggcgcggaatagacaagctcatagttcgccctgtcaaccacatttcccgccgcctgcaggcggtcgtatggctcaaagcggaaatcccttgtttcgtccccgccctttatctggtaaatggaaaaggtgtctttgtcctgtccggcggtctgcgccgtttcctgtgcctttgcgtaaagctgcttcacgtcgccctcggtcagctcgccgcttttgagctgccccataagctcgcggcatttctccggcgttcccgtataaagcacgtcgcccattttcgcccgcccgttctcctgtgtcacataggcttgcaagaggtagctgttttcccggctgtcgctgtaagggttccggcgcactctgtaaatcgtttccggggtaaaggcttctttcggggctgcgcccgctttttcctgtgcgccggattttcccggtgcggctgcttccggatccggcttctccggcgcggcttcctgtccctctctggtgggctgctcctgtccggcggtctgctccttgtcctgtgccttttgcagctccgctaagttctcgtctatggaattgataatctcggcggctgcgctgcgtatcgtttcaagggagcttttcagctcggacagctcccgcccgctgctccacccggcgacatagccgaaagagtagtccgacgtgtcaagcccgtaatgttggcagacagtataggcgacgctttccgcttcgacttcgcgggtgcggcggtcaacgtggggctgctgctcgtcctttggcgcgttgaggtcaatgtcgtgcagcttcgcatgggcgatttcgtgaatagcggtctttaaggtctgtaattcgctcatgccctcgttgatagcaatgcgcttgtcctccaagtggtagtagccatgagagccgccctcgatattctcaaaggcgataggaacgggggaagtcttttcaagggctgcgaaaaaatccttgtagcggtcaacgtcgcctgtcagctcgtcaaccgcaatgtccggcagctcctttccctcggtctgggaaacgtcaaagacggataccaccttgtaggcgggtatggtgacttccttttcctcggtgacgggcttcccgtccttgccgataacgggcttctgcgtgtgcgggtcgattttctgcatttcctgtttgattttatagggtgacggagcaatgattttaattcccttttgccctttcatcacgtttcgttcaaagttgttcttccaagcggaaaagcccgccacaagggaagcgtccggcttctgcatggcgataaggacggtgtttcggaagctgtaattatggaattttgacatgactttcagatattcccggtaacgctcgctgtcaaagagttccgcaataccctgttccagacggtcggtaatctctttgagcttttcggcgggcttctcgctcgtcagcacgatagggataaccgggcgcggctcctgtggctgctctgcggtctgcgccgttctctgccccggcgcggctgcgtccatttctacctttgacgggtcgggtctttccggctgcgggggctgcggcgttacccggtattcctccggcacgtcgcgcccgtcgtaccattctgtaaaggtgttgcggttgttgtagatatagcccttttcggtaaacataccgtcgtcgttaatggaagcgtcccgcccgtattcctcatacatgaaatactttttcgcttcttcgggaagttccggttcttccagttcatcaaccagataacgcccgtattcttcttcattgtggacggacggataaatccagtagcagtcaaggttctgtgcaaggttgataatgtcctgtaagctgtcggcatggtcgccgtattcaatggctgcaatgaatttctcccggtcgtcgtcaaactgcatttccaagagcttccctaaatagttcagctcgtcggggtgggaatactcgcttaaatgctccgtcaagccggggatagtggattgaaattctgtgaaatgccattcctcatagtgcttgaagtcaatcccgatacggtcaaagacttctttcagatgttcggcagtcgtggggaatgtcacccattcgcccgcgggtctgccctcggtgtacttcccaagattggaaagatagccgcttaaaatcggttctgccatttgttcgctcctttctttttcaatcatgcggtgcataagctcaaaatcctcaatgctcatgctcccgtcaaatacataggggttaaaatcctccccgtcccggtagggcttttcggaaaagggaagccccgcttcatgggcggctgccctcgcttcctcgataacctccgggggaagcctgtcgtcatgcgccccgataaaaccgtcaatgtcgttcatgctgttttcgtagtggtaacgcactccggcggtcagctcgtcaaggctcatgtcctcgcctaaatgcccgcaatagtagccgtttaagataacggcggcggggtcaatgctttttatttcctctaaccggctcctgtcctccgggtagagcgtatcgtccatatcaagatgaaaatattccgcgttccatgaacgcccctgtttccagaacgccacccatgcgataccgtccctaagctcgtcttgatagtcctttacggtgtcccgtaaacttgccatagtgaaaaacctcctttctctgcggcagcgtcataagctgcattttttggctgcatggtctactacgggtacgcccgcatttctgccaaatatttttgaaaatttttagagggtgaagccctccgcaaaagagggtttgggaaacttcccaacaagcaaaatccccgtccggcgcgtcagcgtcgcaacggggatttacggaagtgggtacccgcttcctatgcttgctattcaagtttttagttcttctgcacttcgatacggtagttgacgtatttcccgccagtgtcagccagaacgatagttccgtcgtaggtcttgcctgttttcggggagtagagcttcttcacattcgccttgccggatttaaggagcgcggcggcaatcttcgcggaaaaagcggtcttgcgttcctcgaaaaagcggtcattcttccacatgacaaaggcacattctttgttgctgcaataatagtttttcttcccctcatggacgggggaaccgcaacgggggcatttgccgacagagggcttttcctcccggaacaaatcctttttcccgtccagtgctgcggcgtgtgtctgcacaagctcccgcgccatagcttcaatgccggacagaaattcgccggggtctgcggctccctttgctatctgcgtcagattgttttcccattctgcggtaagctgtggggaagtgagtatatccggcagaatacagataaggctgttcccgtttttggtagggataagctgcttccccttgcgctccgcaaagccgccctttaccagtttttcaatgacggcggcgcgggtggcgggagtgccaagcccccggcgttccgcgtccgggtcggtgtccccgttcccggcgcgttccatagccgacaaaaggcttgcttcgctgtggggcttcggcggcgttgtggtatgctccgttacttttgcggcggggttaggaaagccctgtccctcggaaagcttcggcagcgtcacgtctgcattttccccgtcctccgcttcgggcttatctttcagcgtcgcccggtatctgcgttgaagctctttccaaccctccgcaagtacggtctttccccttgcggtgaagtctgtcccggcgcatgagaaaaccgccgtaaccgcttcataaatatgcggctcggcggtggcaaaaagcagacgcgcccccgcaagggtaaggatattcttctcgctttccggcagcgcgtccgggtcagcctttgcaagctccatagtgggaatgattgcgtggtggtctgatacttttttactgtctaatacctttacaacctccggcgtgaagtccgcgcccgccataaaggggagtttttcgcaaagcagcgcgataatgcccgctgcggtgccgcccatgtcgtcagtaagaaagctgctgtccgtcctcggataagtaaggagccgcttttcataaagggattgtgcaaggtcaagggtctgcttcgcggtgtagccgaaaatgcggttcgcttcccgctgcaaagaggtaaggtcaaagagcttcggcggggctgcggttttcttctctctggtgagggaaacgcataccgccgtttccgcttcgcaagcccctttcagcgcgtcggcttctgccttgtcggaaatcctcccgcttgccgcttccgcgccggataaatcaaggcgcacatgataatatttttctttctggaaatgggagatagccgcgtcccggtcggtgagcatttttaaggtcggggtctggacgcgccccacgttcaaggtctttccatacaggcaggagaaaagccgggtggcgttaatgccgataagccagtcagcctttgcgcggcagagggcagacgcaaagagcgcgtcgtattcctgcccgtctttgagggaagcaaagcccgccttgattgccccgtcctccattgaggaaatccacaagcggcgcatgggcttcttgcagcccgccgcttcgtagacaaagcggaaaatcaattctccctcgcgccccgcgtcacacgcatttaccacttcggaaacgtcggcgcggtgcataagctcttttagggttttgaattgcttccccttgtccgggtcaacggcgtactgccattcctccggcagaatgggtaagctctcaaaactccattttttatattgctccccgtaggcggcagcttccgcaagctgtaccaaatgcccgacgcaccatgaaatgaggcagccgccgccctcgatatatccgtctttcttttccttaacgccaagcgcggcggcgatagtctgcgccacgctcggcttttctgcaataatcagtttcattttctgttctcctttcggttgttttaggtttgaaattggtttatactttaagcattactataagaaacaggtgacaatatgaaatcaatacatactttcgatgtttttgctcctactgatgaacaggaagaagcaatgaataaaaaacgtggcgggcattacaggcgcggtaaaaacaaagaaatggattactttattgagtgtgctacttcgctatttcccaacaaccattattcaaggttcacacctatatatgatacgacaaaagagttttatcaactgattacttcttccgatacaacagaaagagctatactaaattggatagcttctaatcgtgcatggaattatttgtttggcttattacggcattattacagaacaggacaccatgacgataattatatctttccagagttcaaaatcgggtcggcttatgtggctgattatctgctcataggtaatagttcagacggttatcaatttgtctttgtggaattagaagctcccaacgggcggataacaaaagaaaaaggtactcgtttcggggaagtaatcaataaagggattgaacaggttagggattggcaaatgtatattgctgcaaattggaatgtaattgtagcagaattggaaaagcactcattctccaatacaaagttacccagacaattatacaaatattgcccttatcaaatctactatgctgtgatagccggactccgtaaagattttgagaatattcgtgatagaaagctccaactgcaaaatgaaaataacataacacttttgcattacgaaaatctcatagatgttgcaaacgaaaattaaaagtccattttcagcgttccggctcacttgcctttttctcctgtacctgtttcagacagtagcccacacaagggagctgccctttgtacggacaggaagcgcaagccggggaatggggaacgggcggcgcattgtcacgccgcccgcccggtctttgtatcatcatcttttcaaagggattgtcggtaaacagggtcatgcttcctcgtcctcctgttcttcatcagaaagcccgtccccctcgtccggctcgtcctcgtcgtagtcgtcaaaatcgaaatcttcaaggtcggtgccgcccttgacgttttgcttcggcttcataaacttaaaataatagaacgcgcccccgccgccaagaagtgccacgacaaggaaaagcacaagcccgcccgcattgcctttctctttgggcagctccggcggttcctcggtttccggctctgcttccttgccgctgcaagcggtcatgttgtccttgcagacggggcagctcacatttacctttccggcttcgcatttttcggtgcaactgcaaacggcgggcggggctgcttcggtgcttccgtcctccataagtgctaagaggtcggcttcgtccacttgattaaggaaatgtacggtgttctcgccctcgtcgtcccggtcaatgaggatataaaagtaattgccgtttttggtcgttacggtgataagctgcttgttgccgccgaaatcgtctacaagggtcgcgttcccgtccggggtaaggggttcttccttttggggttcctcgtagacaacgccgctgtcgttggtgtcgtcctctccctccggggtctgtgcaaaagcggtgacggaaaagccgcccgaaagcataagggcggcgcaaagtgcggtcagtgttctaaggattttcttattcattctcggtgtcctccatttcttcggtgtcgtggtctgcgggttctgcggggtagcccggcgcggcttccatgcccggaataccgcccccggaaagcatagcggaaagctcatgcggggaaaggcgcatggagcgcacaagctgtacgatttgcaggttttccgcttcggttttctgcgcttcaagcccccttaatttattctggtactcggtgattttctcgcgggtctttgcaatctccttgtcgatacgttcaattttgttcatagccatcaataaatttctcctttcagattttcatttttttgttgtcagttccaattcattaagccgtagcccttgatacaggagtaattgacggggtagctctttatcttgcaggcgtcgccggaattgccctcgacggtatagacgcgctccccgtccgtcccgataacaagccctacatggtctgcgctcccgtccccgtcccagtcgaaaaagatagcgtcgccgggggcgatattctcatagcccctcgcgccccattgcccgcgtgactggaaccagggtacgccctgtgactggcacccggcaaagcgcggctcgcttttcccggcttgattgtagcaccatgaaacaaaacaggcgcaccattccacgcggctgttaaatccgtaccagctccaaaagggtcgcccgcctacgttgccgacttgccgcttcgcaaggtctacaacggcggtgttgccggggcgtgtgccgtttacaagctgtacgccgcttaaatcctcggacgcgcccatatcgggggagccgccgccgaaaatcagcggcttgtttccgcttgtttccagatagacgcggtacatttcaagctgctgtggcgttagaagttcctccgcaatctcggaaatgggcttgttcgtcagcttcacgttgaggatatggtactcgtagggtacttcctcgctggtcgtttcccctgtttccgggtctgtgcttgtttctgtgcggtagcggatttccgtttcttccgtcagcgtcaaagtgtactgcatggcaaagacgcggtttagttctgcctgtgcgctctgcggggtgtaggtctgtaaaagggcggtgaggtaggacgctaactcatgggggttatgcccgatactgtcaaggtcatagcggtattcgtcatagccggggtgggtgctttcgatattgtcaatctgctgctgaagctcgttttcctttgcggcgtaattattttccgtcgccacaaggtcgctgtcctccgacgtgtaggaagtcccaagtatgccgttcatcaagccggagaacatggagccgcaagaggaaagccccgccgataccatgatgaataagagcagcgcggcaacggcgatacatacgcccgccgggtgccgccctacaaaagcgattgccttttttgtttcctcggcggtcttttttgccgccttgcgggtgttctctgcggctttctgcgccgtttttgcgccgcctttccttgccgactttgcatactgccgcttgatttgctgcttctgcatgaagcgggaaaggggattgcccgcaatctgcggattgtcatgtagggatttatggtactggaaatccacattcgccttgaacgccgctttctctgcctttgccgccgcccggtagggtttgagcttgtggctgcggtagccctccttgactttccgcgtcccgtactttgcgccgcgctctgccagttcttcggatttgtgcgccccctcaacgccggaattgtccttttcaacggaatgtatcttgttgtggacgaaaatacccgcttcctgtgcggggcgggatagcgggttattgtggggcttattccttcctatgggcttttcctgttcctcaaaatgtaggcgggtcttgcctttcccggtggcttcatcaaaggtgcgctcccgtacaagtttcttttctttggggatagccgcctttgccgcgtccagacggtcggctgctttgtccgattttcggatatacctttcaagctccggcgttgcccgttcctcgtcggtaaactgcaagcgggaagatttttcttttgctgtggcttctgcctgtgctttcctcgccgcctttttgctcgcctttctggtacgcgccccgtcgatacgctccaagacgcgctcggctgcggcggtgtcctgttcccgttctgcccccggcgcatggggaagcggcggcgcggcggctgtgggcgcgggagctgcgccgcccggtatggtctgcgctgcctgttccggcggctgcggtgcttcggtctttgcaaagtccgcgtcccttatccgcttgctgatacgtttctttttcccggtggcggcgtttacctcgacagccccctcgcgggtcattttctgcgtgactttctcacgcgctcgatactgttttatttttctgtccctccaatccgcgcccttgcaagggcgcaatactcggcgtttatctcaatgcctatataatgcctgtcaagctgccttgcggctgctcccgtcgtgccgctgccgaaaaaggggtcaagcacaacgccgcctttcggacagcccgccttgatacaggtttcggcaagttttggcgggaacgcggcgaaatgcccgcccttgtagggtacggtattgataagccacacgtcccgcctgttccgcatggtcggcatgagggcttcgtcgtagtagctgccgcttctcgcccggttaagcccctgtactttcccctgtccgggtacttcgtccgcatatttctgtcccgcgctgcgcccggtgcggtaccgcgccgccgttgtgggggctaacggctcggctatggcggctgcgtcatagaaatatttctttgacttcgtaagcagaaagatatgttcatagcagcgggtagggcggtctttcacgctctccggcatggggttttctttctgccagataatgtcgctccgtaaataccacccgtcagcgcgtagggcaaaagctaaaagccaagggataccgattaagtccttttgtttgcagccggaaacgcggttgttttttgcaatctgctgtccgtttctgcctttcgggttcttcgggtctgcatggtagcccttgttccctgtgccgcagtaggtgtccgcgatattcagccagagcgtaccgtcagaacgcagtacccggcgcagctcgcggaaaacctcggtcagcctgtcaatgtactgctccggcgtgtcctcccgcccaatctgcatatcaagcccataatccctaagcgcatagtagggcgggcttgtgacgcaacagtgtacgctttcctctggaagctcccgcaaggcatagagcgcgtcccggttgatgatggtgtcagttttcagcccgttcatgcttcgcccacttcctccggcttcgtcgtcattacccggtaaagctcggtgtctttcgggaagcggtctacaaagggcagcaccacgttcccgtagaagataagcccctcgcccgcttcggtgtgggtgacatatttcatctgctgcggggagatgttgagctgcttcgcaaggatagcccggtcgcccgccgcctgattgagcatgaggacaaaatcagagttttcaaagatattctccacttcgcgggaagcaagcaaatccttgacattctgcgtaatggctgtgggtatgccgccccattttctgaaacgcttccagatttcaacggaataggcggcggtctgttcctctttcaagagaagatgaaattcgtccataaaataccgggtggatttcctttctgcccggttgacggtgacgcggttccatacctggtcctgcacaatgagcatacctaactttttgagctgcttcccaagctgcttgatgtcaaagcagacaaggcggttgttcagctccacgttggtacggtggttgaatacgttaaggctcccggaaacatacagctccaacgccgccgcaatacgcgccgcttccggctccggctgcttcaaaagctcgttgtagaggtcgcccaagataggcattttctccgggtcggggtctgcaaggaaagggcggtacacgttcctaacggcgcggtcaatgacggtcttatcgacgggctgcaagccctccttgccgcctatgacaagctcgcagagggagaggataaagtcggatttcagcgcaagggggctgtcgtcctcgctgtaattgaggttaatatccatagggttcacatactggggcttcccgtcaatgcccttgcccgtaggggataagcgtatcacttgcccgtcaagccgctgcacaagggaaaaatactctgcttccgggtcgcagataattatgtcgtcgtcggtaatgaggaaagcgtttgtcatttcccgtttggcggcaaaggatttcccgcttcccggcgtacccaagattaagccgttggggttctttagctgcttgcggtcgcagagtatcatgttgttactaagggcgtttaagccgtagtacaaagccgcgcccgtctggaaaagctcctgtgtgataaaggggataaagatagcggtgcttgacgtggtaagccctctttgaatggggataaggttctccccaagcggtacagaggacataagccccgcttcctgttggtagtcaaggcgggttaaggcgcagttgttcttctgtgcaatgcccgccgccgcgaatacgtcattttccagtttccgcttcgtgtccgccatgttcaccacaaggaacgtcaagaggaacattctttcattccggctctgcaagtcctgtaagagattcttcgcttcgctgccgaaagtggcaaggtcggacggtataatatccatgtcatagccgctgcgtaccgctttcttctgttcctcgattttcattttgtcaaggtcggtaatcttgcgcttgattgtctttatggcttcggtctggtcgatactgtggatatgcagattgacgataacgcccgtttccaagtccagaatgtcagataagatacggtcgtttaattccggcgcaaggatttcaaggaatgaaaccgcgccgattttgcgccccatgcggaaataacgcccctcgccaaaacggaaagaggacggggcgataaagtcctttgtggaaagcccggacggggcaagccatgaaaaatcaaaggcaaactgcccgccctccgggtggaaaatgccatgcagcattttaaggcgttcatagcctgtcatggggcgggcagacacgcccaagagcttaaagttgttgagtacgtccgtttcgatacgggcaaggcgggatttcgccgcgcccagactgtcggcttcaatggcaaaggtgatatattttgctttgacaagcccgttgttgccctttgcaagctggtttttcagcatatcccggtattctgtgcggatagaattgaaagcgtcctcctgtgccgggatattgaccgccttttccgcttcgccgcgctgcgtcccttgattgatgaaagaaagctgcaccgaaacggaagcgtcaaagtagttgaggaagtcgcaccagttctcaaaaatggcggtcttgtcgtctgcctgtgcaagctgatagttaatatcttcaaaggcgacggtctttgagtatttccgtcccgtaaccttgcagataccgtccgggtacatctggatataggggattgtctgctgcgcggtgtgggctttcccgtcgccctttgcctgtctgatgatttccgcaatctgctttttctcggcgcgggtgagcttgcggggcgggttaggctttgtgcttcccgccgcgctgtttcttcgtgtttccttttgcaatcgctgatacctccttttcaagttttctctgccgttctaagacggaataaaagttgtctgtcctgtatggtcgttctttgggggctatgaattttgtccgtatgatgttcttcaccaccacttcaaggggctgtccatgcttctcatacatggcaaagaggaaacagggcagcatgacggcaatcatagccatagacgcaaggcttgtgcctgtgctgtctttgagcagaaagaaaagcggcaagccgaacaggagagccgccgcaaaacatacaatctgccgtttggtaaggttgaaagctacttttgtcttgactttggataagtctttgggtacgggtacatacgccaagtgaaaacctcctttctctgggtttggtgttgctgtaattttccataagggtaatcaaggcaaaggtcaatctatgccctttgcccgcccgtattatatgggggttatccgcgtcaaggtcgggtcgtattttcgccgcttcgctctgaaaatctccaccctgcccttgacacgccgctaatgcgcggagaatatcgacttcgccagtgcgccggatttgaacagggagaaacagaggataacggtataggctgcaagggagaatatcgcgctgtgcagattgtccgctattatcatgttgtttaccagaaccgcgtaaatgccgacgcatatcataatgaggaagccttgaaaaccgatagcgaacagggattttaggtagttgtttcctatctgcccccattcccggttcgtcatagttgcaaacgggataggcgataccgaacagtaaaggtaaatttctatcatgcgcccgtagaggataacggttatcagtacggacatgattttcatgcacaagctcacaaggcttgtttccatgacaagtaagagcagttcggggatttccatagcgtcaagcccgctctgcatggaagcaagggcggcggcaacatcaatctctgtgctgccgccgattacccccgccgcgccggaaacaacgtgctgcgccatatcgaacaccgccatagtaatgtcaaaggtgtgcgtcacaaggtagactgccacaaacgccttgaacacccacttgaagaacatggaagtgtcaacgtcgtgcatattgttcttttccgttaccatgctgataagctcatagcataggacgtaggtaatgacaagccccgcaatgggtacgattacattttcactaagggtctgtatcatggagaatatatttgcgttccacccttgcggggtctgccctacctctgcggcgatagtgccgactttttcgtttacgtccccgaacatagttgacagattaccgtttatggctcctatgaggatttcctttatccattcgttaatcgcgtcaagtatgctctgcataagcctttacccgcgcttcttaaccgaacaagccggaaagcagcggtacaagggtcatgccgataagggcaacgccgccgcccgccataagctgcttcatgccctggctctttactgatgtgcgataaagaagtaatagaagtgtaaaaaattttgccgttcctatccggcacttgcgcattgtgtcggataggtcgggcggttattcgggcaagtccaccttgccaacaaaagaataataaatctcaatgtcctgtctgcgggtcttgttctcgtcatagctgcactcatgcacaacgattttctctacaaactcccgcagcagagtaggggtaagttcttcaaagctggtatgccgccggacaacattcataaacttttctgcgttcacggtggcttcctgtgctttggaaagctccgcttgaatagcagcggctctttctttcagctcccgttgctctgcttcatagtctgccgacagctctgtgaaacgctcgtctgatatgcgcccggtcacgctgtcctcatacagccgcttgaagatagcggataactcggctatgcgtttctcggaggcttccagttcctttttcttggcggcgttcctgcgtttgcccccgtcctcgttctgctcaatcaagagtttcataaaccgggcttcatgctttgccgcatagctggtcactttccgcagattggagagtacaccagcggtcaagaggtcggtgcggataaagtgcgccgtacagtcatgggtgcgtttcttgtagttgccgcagatataacagtcctgcttgcgcttgtccgtctggtatcgctgctgatacatcacgctgccgcagtccgcacagaacagtatgccggagaacaaacccacttcatcatagcggtttgggcgtttgcgctgtttgcgaagctcctgcacccgttcccatgtttgggtgtctatgataggctcgtggtggttctcgaaaatcacttgcttttccgggggattttctacactgtgcttgactttgtaagaaagtttttctgtcttgaaatttaccagacagcctgtgtattcccggttttcaaggatatgcactacggtattggtcgcccacttgcactcatagccggggtggtagcggcgggtgctgcccgtcctgcggtattcaagcgttcccggcgtggggatttgctgctctgtgagcatacgggctatcttggtcggaccattcccggcaagacagaggttgtatatctgcttgactacgggtgcagcttcctcgtcaataatgaaattttcatcctcgtccatgaggtagccatacacaggcttgcttgtgatgggcttgccattcatgccttttgagcgttttactgctttgattttcttgctcgtatctctcaccagccattcgttaaagatattccgcagcggggcaaagtcattgtcgccctgtgcgctgtccactccgtcattgatagcgatgaagcggacacctttctgtgggaaaatcatttccgtgtacattcccacttgcaggtagtttcgccctaacctcgacatatcctttacgataactgtcccgacttttccggcttcaatgtccgcaagcatggcttgaaaaccgggtctttgaaagttcgcaccagaataaccgtcgtccgtgtaccagcgcagattggaaaagccgttctgctttgcataggtttcaaggatacgcttctgattggaaatggaattgctttcgccttgcagctcgtcctcatgggatagtcttgggtaaagggcggtaattggttgttggttggtctgtcttaacataaaatcctccgtttccgacagccagccccactattccgtaccttgattgtaccacatggggcggctgtctgtatagcggcaaaagcgtcaaatctgcttctttatggtcggtcaaatcgccgttttttgtgtagcagcttccgcttccagcactttcatcatcttgtcggctgcggtgtcggttgcgccctgcttgaagaagccggaaacggtaaggacggagttgcccatgcggatttccgtcacacagtccgggcggcggtctgttttggtggtgcttgtctgtttcgtttctgtcataggctctcctttcgctgcttcatcagttgctttaagcgttccagcttttcctgtgcggtttcctttcggaagttgctgcccgtgaagcggacgggggcgcacatggaagtcagcctgtcatagatacgggcgtggggcgtgtcctgcgggtgctgcaattcctccagcgtgaggttggtcgtggcgatcagcggcttgccgcttcggtaacggctgtcaatcacgctgtaaacctgttccagcccgtattctgttcctcgctccataccgaaatcatcaagtatcagcagagggtagctgcaaaggcgggaaatatattcgttcctgccctcaaagctggcggcaaggtcacccagtatcgttgcaaagtttgtcatgcagacggcaacctctttttccataagggcgttggcgatacaggcggcaaggtagctttttcccgtccccacgccgccccaaaacaggtagccgatattttcagcctgcatggtttcccagctctccacataaaagcgggcggtttcggtctgcgggtttctgccgttgtcatgctcaaatgtccagttccgcatagcagggtcggtaaagccccggcgtttcaagtcctccactttttcaaggtgcttctgtcggctttcggcggcttgctgcttttcacgggctgcccgctggcagtcgcactctgccgggtggcggtcacgcccgaaacaagtctttccctctgcaaaataggcttctttgggcgtatggcacttaccgcagtataaaagcccgtcctcgcctgtgtagtcctccgcttcggcggtagtggctgtaatgtccgtaatcatagcttcaattccgtttttcataagctctcgccctccttgcatgaataatcgggtatgccctgtttcggggcagccttgcctttggcagcgtcctcctgcgcccacttgtaaatggtggctgcatggctgtggtactgtttcccggtggaagcgatatggcaggaaagccggtcaatataatactcccacttgtcgggcaactctgtttttagcccggaaagctctgtatcggtcagtatcacattgttgtatctgccataagcggcgggggcggggtgtcccgtttctccctctctctctttttctatctctatctctttctctaactctatctctatctctggtggacgaatgtcggacaaatgtccgccttttgtccggggcggtaaaagtgccttgttttccagtcttgcagcccgtttccgctcggcttcggtagaggactgtcctatcatcagctcaatgtcggtcatatagaaagccccgctgtcaagctgctccacaagccccaactgccggaaaatctctaaagccctctcaaccgtccctatctggtggcgggtcagtgtcgctatcatctgcgctgtgtaggggatatgctcgtcaagctgcaatttcccgccgtttttcagcgattttaagtacagcttcaagaggatattggagtataaaatcccgtctttcatatcttccagcagcacaatggagtcgctgtcaaaaaagttctctttcagcttgaggtagtaatacttgcggttatctgccattgtccctgtcctcctttttccggcgtttggagtagtagtgggggcagagtatgataaccgcccggaagctctgcttgcagctatgggtacagccccggcagaggtcattgtatgtgatacgatcgcaggtggaattcccgactttcacttgccgcaggaaaaaagaccattccagccgccgtttcttgctcattcttggcatgggtgcgctcctttctgccgtttccgctggtgtggcggtatcggcggtaattctgtatcatctcggtatcattttcgggttttttctgccctataagcccgttaaaaaatcctttggtatttgcggatagggtacggggcagcccccttgttctgtataggttcgggtacattttggggcggtttttatcgttcctgttcctgccttttcacaggcttgcgctcccggtgtaaaatctggtcgatattgcccttgacagtctgtaagcggcggtattcctcccgttttgcccggtaatcgttgtagccgctgtttttctcttggataagggtttcaatctctgcttgcagggctttatagctcggcagcttggaaatgccgttttccctgaaatagcgggcggctgcgtctgctatgataaagtcgctttcgtacttctgacggtaggctgcttttgctttggcgtttttctgctgtttcagcccgtcccggacagggcgggtcttggaataggcaagcacctgccgttgcagctcctttttcccgttcagcgtcttttccatctgcttcagctctgtaaggctttcccgcatggcggtataggcggcagaacaggcttcgtccagttcctccggggaagaaaagccgtactgctgataggcggtaacggtagctgccatttgctttaggttgtgctttgccgcccagcggtcatagcccacgcccttgccctcggctcgcttggcttcccggtcaaccatgcgctgcaaggtgttgtctgccggggtggtttttgtggttttttccccttgtgacagctttttaaccgcggcagggtattcgagtatggctttgctctgttcggcggctctgtgggcgttctgcgtaagcaggacaaggacagcagccttgtcaaaatcgtcccccagcttccgggctgtgataggctttgtcctgtccggcgtgaggtaggaaagccgcccccggctctccttgacggtcacaccctcccgcagcaaaagggaagaaaattcgtcaaagctgccagcttgggaaagtgcctgccgtatcgtccggcgcagcttcgccttgtccgtttcaaacttggtgggcttggtcggctgtcctgcggcttctctgacagcgttctctttatcaagggcaagctgtcctttctttgccgcccagtattcccgttcggttatccgttccttgctgccgcttaggaggtcgatttggtaaagcccctcccggtggcacatctccatgacttcactcttgaaatattccatagcggcgttggtgcagcggtgcttgcagccctcccgtgtgtcggctggtctgtccatgtagggcagaagcgggacttcataaatccgcagggagttgatgacgatatgcacatggatattgccgctgtggttatgcccgtccgggtgggtgcagactaaggcttggtgtccggggaaatgctctttacagaactgctcgcccagctcctgcgcccggtctacggtcaagccgttgtctgtcccgtcccgtgggtcaaagctgatgatatagtggtggcttttcacatcttcccgtttttggtttttctcatagcggagattagcccgcatacaggcaacagcgaaatcctcgcccccacagttgagggaagaaatgcggtaatcctccctcggtatcagccgcccgttttcatcaagggtgggcttcatggtaaactcgtcatgctcaaatgtgagataggcttccgctgcgccatagtccgcatttttagagctgatatgtttgaatgttgccaacagcgtcacccactttctgcaagacttcaaactttagggcagcaaggtcggaaaccgccgcccgtacctccccggcaagctgcgggtaggggctgtgccactcgttcagcgtccgggctatctggtttaagttgccgccgatcctgccgtattcggcggtcagcttcccgacagcggcaagcaactcgtcattgacgggggaaacggttatgatggggcgtatggctgccccggttatggcttgccggataaactcggcttggctcatgttgtaagcagaaagcctttccgcaaactcggcgtattcttcctcggtcatgcgtgtcttgactacccggctgcggtgcggcgtgttatatcgttttcgcatggtaaaacctccttcggctgtgcgtggtgtcctctcactaataggagaaaaacagggtgtaaagcggaactgtttttgaaaaatccgaaaaattattttgagggattttccagcggcgtaagccgcataagcagggtttggggaaggcactccccaacaagattcccgcaggggcaaaatgagcgataagcgaattttggtactgcggtagaatcttgctctaagaaaacggcgtaaacttccccttctactccttactacgcagagaaatgaagatatggcaaagttttgggaaactttttgagaaaacttttcgacaaagctggaaaatcagcacgttttttggcgcaaaaaaacaggaaaccttttcttgatttcctgtcatggtatgtcgctgtggtgggcggcggttgttctgttgttattccccggaagcaaacttgtagcctatgcctaaaacggtctttatgtaggtgggcttgcggctgtccggctctatctttttccgcaggttgtaaatcacgttggcaacacttgaatggcaagtatcgctttccatgttccaaacggcttcaaatatctgtgtccttgtgaggacaatgccgggattggaagcaaggaatacaagggcattatattcaagacgtgttagattgacttcctccccgtcttgaaatacccggcgttggctctgccttatttccaatcccggaaaagataacacggaaacgggtgtaagctgcatgggttcaagtcgcatataattagatattgccgatatgattttgtcaatcgctgtttcctcttgttcgttaagtgtcagtagtagtaattttcccatgttcattaccccttttatccgttgaatttaaactatatttttctgtcgtgttttttgacagtaagcaacaaatatatatcatagagagcgtaatgtcaatttaatgtcattaagagaataggtggtctgtctaattattatcattttgttcatttgcgcctacgctgcgtttggcattttggcaattcaatatattgtaaatttatctatatcagcgggctaacctcattttcacaaaataagctaagtttgtgaagtgctcttgtgcaggcaacatataagaggtttttatcatcttcatcatggtagttttggctgtctgcatcacaaattaagacagcatcaaattctaatccctttgacatatatactggtaagataaacatgccttgtaaatctgatacgctcccatttttgattaactgaatatcaagtttgtgtttaattttattaaatagatagattgaatttttttcggttttacaaattaagcatatcgactgaaaccctttctcctggcatagatttatttccttaacaatttcatcaatgaagatttcggaattatcagcaatatatacttttgggctatcgccattccgattaaaactttttatctgtgaacttttttcaatgaactttaaactaaaatttaaaatttcattcgtacaacggaaacttttatccaacataataagagaagattttttcttgttcaatattttttgaatttgttcgtagaaagaaatatcttcttttttggcaagagtctgtttcatatctcctaaaatagtaaatttggcattagaaaatagcaaattaaatatttcatattggagagggtagtagtcctgtgcttcatcaatgactacctgcttaatatttttatatttatttgttccgtatatttttaaatacaaataagcgattgctattgcgtcatcataatacaatctgtctgcttccaaattttccctagtatattcccatatactttttatgccttgtgacagattgctattttgcagcaggctataaaaataggcttcattgctaaataatattttatataattcaacaatgtcaatttttataaatttctgtatttcctgcttgattagatttttttcttctttatgcccccgcccttttcctgttccaaatatttgttctaaaatataatcttctaattgttctaattttatgcctaatggtgtttctgttcttcctaatattttatcttttagaatttgcctgcttacaacgcattttccctcataataaacatcttcaaattctatccactggcggggtatatcaatgagaaattggtctaaaatttccctaaaaaaacttgacgttttaaattctatactatttcttgaaatttccttgtattttgaattgacaatcaggttttctaaaaaatcatttcttgactgaattttcctgccaattaataacgcactaagtatatcttcaaacacggaagaaataacattatcttctcccaattcgggcaatacatttgaaatatattgctcgaatatagaatttggggaaataatcataatgttatttgcggacagctttgtttgtaaaccttgatacataagataagcagcccggtggagagcaatagaggtttttccacttcccgctacaccctgtaccattagcaggtcattttccatatctctaataaccacgtcctgttcatgctgaattgtttcaacaatcgctttcattttagcagtagtgttttgtgacagtaattgccttaaaaattcatcaacaatctgaacatctgaatcaaagaaatattccagttttccgttttttatttcatattggcgtttcaaattgagttcgcctgttactcgtccacatggagcgtcataaaacgcttcgccggtcataaaacgatagaaaatactggcaatcggcgatctccaatcataaacatacatctcttgatagctgttttttcgtagagaagaacgtccaatgtatattttttcaaattcgtcctcatcatcaaatttaaaatcaattcgggcaaaatagggcgatttaatcatcttttctaacagaagtattttatgttcttcttcttcgtaatctataattttgtctgttacaggattgatatattggcttaattcaacaagtgcctcgaaaccgtccgatgtatacagtgatgtaataccgtgttctgtattttcacgcacatcttttttggcttcgataatttctgatttctttttgtctgccgcttcttttgcctgctttaattgttcctcggctaaagagattgtttgtgctaatcttttttcttcaaacgctttttctgtctgattattccccataatgattatgacccccttgaaaaatgaaagaaaattttactgaaacattgctaggctagtttagcatgtgtcagcttatataaacagtcttgtatttataaaatttgtatggtattattatagtgggaagaagtatgttagatatttgatttctgcaagcatatcaattctaatacggacgtgtaattaaaacaataaaaaaattgggacaaagcagttataccactatgtcccaatttgctattactccatatcttcagcagacagaaacacaagcccgacaaattcttcctcaatcagtttcttcaacttttccactgtgctctatgcaggctcccgtatctccattccaacctataatctctttctgtaaaagcaaatcttgttctgtgaaaaaatgagttggattccgtagtagtcggcattgtgcgtaatgtgtataactgactgtatcatggaattgtgggtaactctgtttgcaggacgtgggaaagctgcactttagcttttccatgtgctgtgaatagagttatccatgattccatagcctgttatgcacatttccacaatgtttgtcttttggtcgttggttcggaaaagaaaagccctgtatgttattatatacagagccattctaatctttttttatccactacatagagcgtttcctttctgcaaaattcattttacagagtgatacccgccttttttgcaaagtagtcttttctcccggtaagctctgactgtttttcctttggaagattgttgaataaatcatcataaagaacatcagctaactgcatttctctcgcaagcaaaaatacatttagactaagccattcctcccaaagcccctcaaataagctgttactgtctgtataggtgtcaagctcctcaaagccatgtgacgctgtatagcattgcagtttaacaaagccatacctaccaacatcaaccaacaaaatatcttcgtcctctatttcgtacagttcctcaaacacatcaatcactttgcgacacttttcccgttcttcctctgtgatatatactgttttttccatgctcaattacctctatcctttcaaattgtggaatactgttttcagttttcttctacttctgaaccacatatttgaaatgccatatatgccattttatacggaatagaggttggctgtctgcatttatcagtgtgttactttatggcacatgagcatttgcgcccggattgtcattgccgtagccctccatcagattgattacgccccagataccaagcccggctccaagtgctacaacaagggtctgcaaaacgtctactgcgctattgaaaaatgccataaatatatcctttctgccgcgtctgcggctgtccggcaagcggacaaaaggcggtcagcgtatggtcgccgccgcacaaaaaaaccgccctctggtaaaggcggctgtccccgcgctgcgtaagttctgcggcgcggcggtattcagttgtaaggggtgcggctcctgccgctgtgtactgcgccggaaagtgggggcgcgtatcatgtagccggtatggatagatgtgattgcttcaatcgctcctttctgtgttccgctgtgctgccggacgtttttttcagacttgcgggaagtgaatagcttgcgtagcaaggtgttcgcttcccgcaagttcacaaaggggtagctgccgcaaggcagcgtaggggaagtgtagcttcccctgtcccccggcggtctgccatgctgtcactgttgcgggataagcccccggcgcgtgacatactccgttgcaaaacggcggtgttccgcttccttttcccgccaatactcccataatgcagcgtcggcggcttccgcaacattcattaaaaaccgttcaagctgcttttgtttttcctctgcgctacgtttcctcatggtctgcgtcctcctgtaagtctgccgcgtcaagctcgtaatagtcaaaaacctcgtcgggcttgacaatggcggggcggcgtttaaggtgcttttccatgtcaaaggcgttcttcgggtctgcgtcggacaggtacttgtatttcgggtgcttcgttatgtcgaatttgtccgaaaagaacgggcgcaccccgcgtagctgcaagatacatttccctccgtccatgactgcaatttcatcttccgtcataagctgctttcccaatttctgatagttcagcccatgcgaaagctcccgcccccttgtttcggacgtgttaaagctgtctatcgtttcttttcctaaaatttccgatatttctttaagggtggttttctccttgccgcccaagaaaagcgtggtgtcgcagttgccgactatggtatcggcgttgtctttgtaaatggcttttagctgtgactggctctgcaagatgattgacgcggatatttcccggctccgtatcgttgcaatgagcttttcaaactttggtatctgcccgatattcgcaaattcatcaagtaagcacctaacatggacgggaagccgcccgccgtattcatcatctgccttgtcacaaagcaagttgaatagctgtgtgtaaaggattgaaacgacaaagttaaaagtgtcgtcggtgtcgctgatgatgacgaaaagggcggtctttctgtcgcctatggtgtcaagctccatttcgtcggtttccataagctcccgcagctccttaatgtcgaatggggctaacctcgcgccgcatgagataagtatgctttttgcggtcttgcccgccgcaagtttgtattttttgtactgcttgactgcaaaatgttccgggtctttttcttccagacgttcaaacatgaggtcaaccgggttctggaaatcctcgtcgtcctcgcgggcttccgacgcatttatcatctcaagcagcgtcgtgaagttcttctcgtcctccggggcttcataccagatgtagccgattagcgcggtgtagtagagcttttccgctttcacccagaaatcctcgccggatttttccccgtcgcctttggtgttggcgataatggtattgactaacttcaaaatgtccttttcgctccgcagataggcaaagggattgtatttcatggattttttgaagttaatcgtatttagcactttgatacggtatttgtaccgctgtaacattttcccggtttccaaaatcagtgttcctttcgggtcagtgacgatatacgacgttggaaaatcctttgacgtacattgcatgagcgacggtttcacaaagaaccgggtcttgccgctgccggaaccgccgattacaaggatatttttgtttcttgcgtatttcggctgcttcgggcggctgttcatggtgagccgttccgtctgcgttaaggggatattgttctcaaataccgggtcggtgtacggctttatgtcgtcagccccgccccaacgcgccgaaccgtattctgtcccgcggcggtatttcttcgcgttcttgcctttggtgtagataatcagccggacaatgaccgcccccgcaatgcctaaagctaagtctgccgggtggaagctcggcgcgatactggaaaaggcggcggtaaaaccgtccccaagatgtagcagctttgcgcttgcgtccgcgccgggggagagccggacagccgcgcccactttatcaaagagccagacaaagagcagatacgggagatttaggataagcagcttcttgatttccggcttcatagcgatacctccctgtccttgttcttgacctttgcccgttccgcgtttctgccctgtgcagcttctttgagggtagagagcagctttcggattgagggctttttctcctgtgtcagcttttttgcggaaaattccttaaaggctgcggtcagtacgtccgcgtcccgccccttgaagaaaaccagatagcggggcgggctttccgtcgcgtcctttttcagcgcaaagtcgataccgtactttttcgccgtactctcaaaggctttgatattgccctcggtaatctcaatgttggaaacgcccgcgttctgcttcataagctgctttaagctctgcttgccctgtggcggttttgcaagctgctttttgccctttgacagtatggctttcattgccttttggagcgtctgcgcggtcagcttcccggtcttgatgtaaagggctatggtcttttcgtttacttcgtcctgcaatttgtcgcgtcctcctttcgcgtttctttatggggcggcggtcagatacgcacccgcagcccgttcaagtcctcggctctgatacccacaagataccagttgtcgccgtactcaatccgggtcggcttccacttgccccgcacgaatacgtcaaagcactcgccgcaatgcaagcccccgtagtagctgtttaagtcaaagcggatgtcgtaacggtcggtgcgctcgtcaaataccaatgctcctgtcattttctgtgccataataaaatcctccttttgtggttgtgggtggttacaggctttcgccctcattgcatgaataatagtccgggtcgccgtactgcggctttttcggtgacagtgcgccgcttgccatgtcatgggcgacaagggaagtgtagtagttgccgattgtggacggggcgttgaaaagggcggctttcagatattgcttgatgttgcggattttggttgtgttctcccgcatacagtcaagcacaaagcggatatgctcgccgtctagtttcataaactttgacttcacaagctctgccgggtagtcgtcccccgcaatccgtacccgctttctggcggtgcatacggtttcaagcatgaggtctacaatctcgtccagcctgtcactgtcaaacttcatgtcctgtttgagaatgtggtagtcgatattgtccttgatgatttcccggtatatatcaactgcgctctgtgctgccgcttccgttcctttccgttccggcggcgcagccgcttctctgcaaggagaggggttaggggaaaggataggaatggaatgggtacttgataaatctgtatttgatttttctttttttggtaagtcagttctttgtatatctttatttaattgcgttggattttccaacgtaggtttttccaatgttggtttttcctgcattggattatccaatgttggattttccaatgtaggtaaatccggcgtaggcggctgcggctgctcgaatatcacatagtccgcgccccgcaagcgtcctttctcgtcgcgctcccttgaacggacgatatacccggcgcgttcaagttccttaatggcttcgcggatagcgtctatcttctcccggttgataagggataagcctttcaaggtgtagtcccaatcttcggggagtgacagcatttgcgacaacagcccctttgcctttagggaaagctccttgttgcgtaggtggtggttgctcattacggtatagcccttgtttcgttccactctgaaaactgccatagttcatagctcctttgctttggatttgttacgcagtagaagcgcggtttcgggggataaggtataaatccctttccgcgccagatacgcgcccggaaaaccgcttgtagcaaggctttttctgcccctactgcgtaacaaagggcatgaaaaaagcggcgttcctgttctcccatgtagagagtaagaaacgccgcttctgcgtcgtattcagtttttagtacaataccctgcttgtccgtcgctcgaaaaaccttgattttccagtgttttcaaaagtatcgttatctaacgtcagctttccaaagaccaagtttccagaatatgattaaggacattgaaaacgggctgataaactgcgtgattacaaaagatttatcccgtctggggaggaactatcttgattgtgggttatatctggaagtctttttcccagagcataacgtgaggtatatagcggtcaatgacggcgtggacaccttaaacaaatccgctatggacatcacgcctttccgcaacatcctaaacgaaatgtattctgccgatgtgtcagtcaagataaaatcggcgtaccgtgcgaggtttcagcaggggaaattcatgggaacaacagccccttatggctatgtcaaagaccctgccgaccacaaccatctgctgatagatgacaaagttgcccatgtggtaagggagatattcgaccttgcgttagcgggcaacggcatcgccaaaatccgcaagcacatcaacaaacagcatatcctacgccctgccgcttatgcggtggagcaaggggcaacaggctatgagcggtactttgaggataacgaggaaaaccgttatatttggagcgagaacagcgtgaggggcattttaagaagcccgatatatgcgggcaaccttgcaggctacaagcggattgcagccaacatgaaaagcaagaaacgcccctctaagctgcccgaagaatgggaagtgataccagacacccatgaggggatagtcacgcaggaggaatttgacaccgtacagcagcttatgacgagccgcaggcgggagcagaacgcagggggatttgagaatatcttttcgggcgttatcaagtgtgcggactgcggctatgcgatgcgggcggcgagtgccaacaggaggaaacgccccgacatcatcgactgcgtacaatacacctgcaataattatggcagatatggcaatgttatgtgtaccgcacacagcattgaagcgagggacttattcaatgccgtccttgccgacatcaaccgctttgcggatatggcggtcaatgatgaaaaggcggtcagagccatagaaaggcggctcacggaaacagaccagagcagggcgaaatcattagagaaagaaaagaagaagctgaacaaacgccttgcggagcttgacaggctgttttcctctctctatgaggacaaggtaatggagcgtatcacggagcggaattttgagatgatgtcggggaaataccagaaagagcagcttgaaattgaagcacggctgaaagaggtaacggaaacgctcaatgacagctatgagaaatcgcagggcgtgagggactttctatccctaatccgcaactatcaggggctgaaagagttggacgcaaccatcataaacgcactcatagacaagatacttgtttcggaacgtgagaaacttgcggacgggacagtaaggcaggaaatcaagatttactataaattcatcggctttgtcggtgaattacatatcacacccacaaagcggtggacggcgttaaagcctaaaaattgtacggtgtgcggtgttgaatacgtccccagctctggaatatcaaagtattgtcccgcttgtgctaagaggatacagagggagaaatcaaacgagagcaaacgcaggagtagggagaggaaccgaagggcatgtattgaactgtccgcaaaaaatgaccgactgatggagagcagagacactggcctccaaggaaacggcatatttttgtactgttttaagcacttcgccaatctatgatattaaagggccggatgcagcaagatttttaagttccatttgtgtgaatgactttacaacagcaaaaccgggagggatccgccatgctgtctgctgcaatgaaaaaggtcagattaccgcagacggtgttgttatgacattggcagaagatcacttccgcacttactggattatgccggtggttgattacgaagcatcgaagactactatgaatattacgggggaaaatatgatgatgaaggagtttttccttcagattgctggtcctaaaagtcttgagattattgagcaggcggcaaagcaggatattcatgggctgaagtttgcaaaacacatgatgatccggattgcgggtgtggatgtgcggattctccgtctgggcatggcagggactcttgcgtatgaactgcatggagatatggaaaaatttgaagaggtctataaggcgctttgggacatcggtgttacatatggtgccaaaaaaatgggaaatcaggcatatgttatgaatcacacagagggtggcttccctaacctgaacatgcattatcctctgccctggtacgaggatcccggactggccgcctatctggagaaacatccaatggagggcttctggaactggaacaggcatctcgtgggaagctgcggagacgatctggaagtgagattccgcactccgtatgacgtagggtgggggaatctggtgaactttaaccatgagtttccgggaaagaaagcacttctaaagattgcagagaatccacccatggatgtagttactttggaatggaatgccgatgatgtgggagagatatttgcgtctcagttcagagggagagatgtggaaccctatgatgagatcggggaaaacccggtagatatctattttaatctgaatgtcagcggcggatttatctatcatcaggattatgttatgctgggagatgaaaaaatcggggtttccgcggttcgggcgagaagcgcctactacctgaagatgatttcgctgggctttgtgaaaaaagagtatgcgaaaccgggaacagaactttcagttctttggggaagaccgggaacacctcagtacaaggtacgcgtaacagtagcacgtacaccgtatgtcgattccgaatttgtcaacaataaatttattgatgtggaggagattcctcattataggaaagaatagggaaaaagaacacccctgcagcgtgtgattggctgcaggggtgttaagcgccaagaagggcataatgcttctctatctcatttttttgaacgtatctctgagcgcataataacactcatcgaataattccttcaccggagtataagaagctgcagcctgaggaaccggatcatgagtggcttctatatgtatgaaacgatcaattgctgaaaaatccttaaataaacctacaccgacaccgcctgtaacagcagcgcccatggaaccggcttcttctaataaagtgggaaccaggattctggcattatatacattagccatgatgcctctccacactttaccctttgcaccgccccctaagactaatatttctttaatgtctacctgagtcttaaggacatccagtataatagacaaattcattgtgatgccttctaaaacacttctaagcaaatccccccttgtattttcgggctttagcccgatccaggctcctttggcatggggatcccatcggggtgcccgctctccaaggagatacgggagaaagatcaatccattagcacctatagggctgtcctgaattgcctggttcatatagtcataaggtgatcctccgtggagcttagcatcataagattccatcttacagatacattcttttacccagctgtatgctccccctgcatactgcatagtaccgtttggggcatacagtccgggtataatatgggcccaggtaacagttctcatctgttcatcaaaaataggcttttctgtggtggtggttatccaggccgaagtgcccatacagctgtatgtctttccgggtgcaatcgagcctgctcctacattggctgcaaccccgtctccgccccccaggacaaccggggtattctcggcaagtccggtggccgccgccgcatcttttgtgacggtaccagctataaaggtagacggcttcagttccggcagcttgtctatgtcaatacctgcataagacaataattcttcggaccactgcagatttaataaatcaaagcacccgttgctgttgccgtcagaatattccgtataaaactttccggtcagacgaaacacaatataatctttggcatttaatgttttataagtctgttcataaacttcaggttcgttgtctctgatccacataagtttttggattccataggaggcagtattccgatggcctacaatatggtagtaatcccattgagagatgtgttcttcaatctggtcggcttgtttctgagcccgctgatctgcccatatcattgagggacgcaggggagttccggaggaatctacgcataggcaccccatcatctggccgctgaagctaactgcggcaatgtcagatggcagaacgccggtggattcaataagctgacggcttgtgcagcagactgcccgccaccagtcatcagcgtcctgttctacccaggtgccgttgaagtaatgagtattgtaggaataaacctcgtggccaatcagcctcccgtcctcagaaaacagtgtggctttattcccggaagtgccaagatcatgtgctaaaatatacttgctcatataaacctcccaattgtaatgttataatgtttgtttgtaggtacataaaaaatgataaaaataaatgtttatgtaattgtccctgacatacagcatttttttgtatgtcaagggattcaactattcgggtgccactgttatctcaaatacatttcgatcgccccggtatcttgccaatgaatattcaatgggctgtccatataggttatatcctatggaagtaaaaaagtggatgggcttcccttttttcatattaaggtgcctggcgtcctcactgtctgcttcaaccgcctcaatctgcctctgtatttttacaatttttgtgtcgtcggatttgccaagctcagcgtaaagagaaatagttgtaaagtcaaggtttataagatcctggcatctgctgtaggggagatatgttttaatggtgaccaatggttcgtcgtttgcaaatcgcctgcggtataaaaagagtacctgatcattctcacttaagttcaaaaatttggccacggtgatatccgcaggaataacctttaaatccaggacttcggtgcttgctgttaatcctctccgagccatctggctattaaaggattctatttttgttataaaatcctcattattaattttgggcttagagacaaaagtacctttgcttttaattcggtacagccgtccctcctgaactaattcagtgatagcctgtctaactgtcgtacggctaatcttaaagatatcacttaattcattctctgtggggatggggctgccgcttggataagttccgttttttatttcatccaaaataatcttttttagctgaaaatacaaaggaatgggaactgatttatctattcggtctgcgttaagtgccatatgaacctcctatgaaattactgcgaaataactatctttgtcgttacattatatcataacaatgattaacgtgcaagcacttagcactaaaagtttattgttataacatagtgacatagagtaaaagttgtgttgttgatttaaaaaaataaaataagagatataatgaatgtttaatatttaataattttgaagatttcagaatattatacatagatgttcttgtaaaaaataaaatataacaaaaaataggtacatagctatgtagtaacaaagatacatatttttgttgacttttttgtgcgtacgtgttattttaccattaaaggatgtatgatacataagagtctccaatgcgcattagacagattcaccagtacagtccggtttcataaaaaagcgaacagacatttcattattttaggaggtatagtaagatgacaatgattcagcatcagacgagagctttcgggtcacccagcagatatattcagggacgctgtgaattagaaaatttaagggaatatacagacgcgtacggaaaaaaagtatttatattggtagacacctttttctttaaagaatataaagaaaagtttgaagctatgtatgcaggcggcgacagcactgtgatcgtagaagagttttcaggggagataactgccgaaaagattgatgagatagcggaaggtctgagggcatttggtcctgaggtagtcgctggtatgggcggcggcaaaacaatggatacagccaaggctgtctcagacatttttaaagctgttacggttattatacctacaacggcctctacggatgcgcctaccatagggctttcagtgatatatacagagacgggagaacatgtgggtcccagacattatgttaagaatccggatctggtactgctggacacggatattatatcgaaagcgcctgttcgttttctgattgccgggatgggagatgcgcttgctacttttatagagacgagggcgaacctgcagtcacattctcctaattatgtagggaaaggattctgcagtacaattgcagtgggcgccattgcagaggcgtgccacaaaacgattctggaaaagggtgcaagagccagaagagcagcggaaagaggactttgtaccattgatgtggaggacgtaattgaggccaatacactgctcagcggattgggcgtacagaattccagctgtgcgggtgcacattctattgcagagggaataacggttcttccggcctgccagaagctgctgcatggagaagttgtggcatttggtattttagtgcagctgatgatagagggaaggccgaatgaagaaatagaggaaatatatgcgtttttccgagaggttggtctgccctccacatttgcagatcttggacttgagaatgttacagatgaggagatcatgagcgttgcagaagagtctctgaaatcttactgggacgtggaacccttcccggttacggcccaaatgatccatgatgccatgatcctggcagatatccaggggcgccggttcaaagcccaggcataagcatatgaaaggcagaatatttaacatacagagatttagtgtacatgacggaccgggtatccggacaaccgtattttttaaaggctgcaacttaaggtgccaatggtgtcataatccggagtcttatgagacgggcatacagctggagtactttgcagataagtgtgtagggtgcagagcctgtgaggcggtctgtccccagggcgccaggattcaggacggccacagaattcataggcagggctgtacactgtgcgggaaatgtgcagaggcatgtatgtacggggccattgccatagccggatgggacctggagccggagacactattagaaacagttcttaaagataaaaagtattatatgaactccgggggcggaattacgttatcagggggagaaccgatgcttcaatgggagttcttgtcagaatttctgccattggtgaaagagaatggaatatcagttgctttagatacggcaggtaatgttccctactggaagtatgagaagcttttcccgtacctggatttcattttattagacattaagattatggatgataccctgcacagaaagtatacgggtgtatcgaacaaattaatattggagaatgcaaagcggtttatagagcagggtatcaggatacatatcaggattcctctgataaaaggcattaacgatacaatagagaatgcgagacaactgacgcatcttctgggtgatgcccccaatgtggaagaagtgcgtttgctgccgtatcatacccttggagtgagaaagtcccagagtctagaattgcctgtctgtgagttttctccccccgaggcacatacgatggagcagcttagggagattttcggggataaaggggtctgttaaaagcagtcggatagagaaaggaagggatagccagaatggtaagacgtgaactaaagaaacgaatagaaaaatggtttgacagagattaccgggaaacctttatggaacgaattgacttggttatggaggcggagcagctttaccagcatgagaaggagggtctggcatacggccatacgctggcccacattttggaaagcatatctctgccgctggaagacagcgaacttctcgctggcgctgttgccatgcggattcccacagaggaagaggagaaaaccatacgggaagtatacaaacgctggtgggacattccggtagaggaacggcacaaaaaaatctttttctactattcagagaactggctgcgctgcagaccatactggtttccctcttttggccacctggcgctggactgggaagggctcctttccaacggactggggagtatggaatacaaagccagagagcgcatgaaggatgaggcgcttacggaggatcagaaagggttcctggaggggactgttctgtgttatcaggcggtaagtgcttatatagaaagatatgcccaaacagcagagaaaaagggcagaagcggcatggcagaagatctccgccagatcgcctatggagaggccaggacatttgcgcaggcgctgcagcttctctggatgattatattaattgcacagaaggtatgcggctgcggcgtattgaacctgagcaggatggatcaatatctctatccgctctatgagagggatcttagggaaggcagacttacctatgaaaaagcaagggaactgatagatgaattcttttttaagaataatgagattatggtgcagacggatcatatgtccatagagacagattctacggactacaccctggaggttgcatttgacgatcccaattatctgattcttgcaggtaagaaagcggacggaacagggggtgtgaatcctttgtcgtggttaatggttgagtcggcggaagagctcaagcttcgaaacccctttgtggtagtacgctattaccatgggattcccacaaagttctggcagcttgtctgcaatgccatgagaaataatgcaactattgttatctataatgatgagactatgctgcctgccttaaagcattatggggttgaagagccggaagtatacgattatgggttttatggctgcaatgatccgaacatccccggggacgaagggggtctgcgccaattgtggtttaacctggtgaagcctttggaactggcattgaaccagggggactatcccatggaaccaagaggtaacagcagtcccagagactgccaatttggccctgaagatcgtatgaccgggcttatgaccggtgcgtattacggtataaaaagtaaggctccggaagagatccagagtatggatgaactgctggaagtctatgaagaacagcttatgtacttgttaggagaattccgaaaaggctttgagatggattttgaagcagagcaaaaagagacgaaaagccgcatgagaatagaggactgtttcctgaggggaacagtagacaatgcacagacctggaccatggggggaacaaagtaccataaaatagttgcccagggttgtggaattgcgactgttatcaatgccctttacgcgatagaaaagcttgtttttactgataaagaatttacgttaagagagctgtcggacattctgcgggatgacttttccggaaatgatatgttagcgctgcgtctcaggaaaaagctggataagtttggaaacgatatagatgcagtggataagtatgcaaagattgtaacagacctgtatgtccgtgggatagagagatataacggcgaaggctatttatatcaaatgtggcctacctattcaacagacagggactttacaactatggggcgttatgtaggtgctacccctgacggaaggcgtgcaggggaaccaatcagtgagaaccaatcgcccagtgaaggaagtgacattaacggaattacagcaatgctcaattctgtttctaaaataccttttgacaggatcacaggagggcctttaaatctgcgcctgcatcccagtgcggtacagggcgatgagggactaaatgccctgtgcgcacttttccagacttacatggaaaacggggggatgcagcttcagattaatgttgtggatgcagagacacttcgaagtgcccagtgcgatccggagaagtacaagaccctctgtgtcagagtcaccggatacagcgcgttttttgtagagatgggaagaaaagcgcaggatgaactgatagcgcgtacagaacaaatggtataaaatggcttgggcctgttaaacgacaggcccagtggccggccccccaacactggcgtaaaaaatataaacgtttgatatcttgtaatgtagtatcattactatatagtgatataagaaatggagaaaatagcgatatgaatatttaccagaaagcgacacagccaaccatgtattttataggagttaccacgaatagctcctcaattatgaaggtattcccaaaatgggcagaggaattaggcttaaaggacgcggtgattaagggaatagactttaagcctcatgcagatccggcgctctatcgggaggcagtttcttttataaaggaagatcccatgtcccttggagctttggttactactcataagattgatttgtatgaggcctgcaaagatatgtttgaatatctggatccatttgctgttcagttgggagagatttcatctatctctaaaaaggacggaaagctttgcggacatgcgaaggatcctatatccagcgggctggcacttgagaacttcataccagataattactggagaacatataacggggatgttctgattatgggagcagggggaagtgcgcttgccatgagtgtttatctgacccagaaaaagttcggagaaaatgtgccgaaacatattatcattgccaaccgcagccaacccagactggatacggcagaaaagatattaagagatctgaatccggacaccaaatttgaatttgtccggggggaggagcctgttgataatgaccgtctgctaaaaactttaaaagagcattctctgattgtaaatgcaaccggtctgggaaaggacggacccggttctcctctgacagatgggtgcgagtatccggagaatagttatgtttgggagctgaactaccggggagagcgtatgttccagagacaggcagaggctcaggcggaggctaaacatctgcatgtagaggatggatggatttattttatccatggatggacgcaggtgattgccgaggtattccatatagacggcattgcacgtaagattcccagactaagtgagattgcattagagaggtaggaggagcgctatgaacagatttcagtgggacagcagtttttctgttgactttaatttacaaaacggattttcagagaaggctgagacaacgaaaaggtatttatctcagatgacggaaatgttttatgatacaaatgccgcagaaaaaatactggaacaggaagatcccttagtctatgagtttcatgagctggggtgcccaatgagagagggggatttggcttttggcactaccatcctgtatccgggcaaagtagggaacgaatattttatgacaaagggccattttcataccatattggacactgcagaggtctattatacactggacggtgaaggctgtatgattatggagaacccggaaggggaaacgatggaaatgcctctgaaaaagggagaagcactctacgtgccccgcagatatgcccatagatccgtcaacacgggagatacacccctggtcatgttctttacctttgctgcaaatgccggtcatgactatgggaccattgagacaaaaggataccggaaaatattggtagagaaggaatgcgggcctgtggtaattgataatccaaaatggagttaaaaatatgggaaaagtaatgacagtctctggccctgtcactgcgtctcagctgggatactgtcagtgccatgagcatcttcttatcagtagaggaacatcgtttcagatcaatcccgctctatggatggatgatattgataaaagtactgcagaggcgctgaaatataaagaagccggcggagatactgtgattgatgcccagccgggcggatgcaaccgcatggaggaggggctgctggagatatctgatagaacaggaatacatatcatttcatccacaggcttccacaagctgatgttctattccgatactcactggattcacagaatgccgcaggatgagctgtaccattttttcagagaagagctggaggtgggcatgtacaaggagatagactgcggatatccggaaaaacaaaccaaaatacgtgcgggtattgtaaaaacagccttagacagggaaggtctttctccgcgttacatgaacttgttcagggcggcggctcaggctgccatagacagcgaggtaccccttatggtacacattgaacctgggagcgatcccaaaaaacttttggaatttctgctggagatgggagtttggcggcatagaattattttctgccatatggatcgggagattaaagagacagagtattatctttctgtactaaaagaaggaatcaccttggagtttgatacgattgggcgttttcactaccatgatgatgcaccagaacttgcattaattaaagaaatcttggatcggggctacagcgggcagcttctgctgtctttggataccaccagagagcggctgaaatcatatacccccaatggggtggggcttacttatttactctgtaatttcctgcccaaacttaaaaaaatgggtgcttctgaagaacagctccttaatgtgacggttcaaaatgtcaaaaatatttttcatgaatgattatgggagagatggatatgaacaataatttattgcagcagatagaaaagtataagatagtaccggttgtaaaagtagaacgtgccggggatacggggagactgtgcgaagccctgagcacaggaggacttcctgtggcagagataacgtttcgtacaccggcagccagggaagccataagcgctgcggtaaaagaatttccgcaaatgatagttggcgctggtaccattgtaaatgtagagcaggcaaaaatggcggttgatgcaggcgcccaatttcttgtttccccgggcatttcccacaaggtgattgaatatgccctgaatcagaatattatgatatttcctggcgcatgtacacctacagaggtaatgaggataatggaatatggcttatcggttgcaaagttttttccggcgcagcaatatggcggccttagtacgataaaagcgttgtcggcacctttctcagacatacgctttatgcctaccggagggatcagcgctgcaaatgtgaaggaatatctggcatttcccaaaattgctgcctgcggcgggagctggatggtacggccggaactgattgccgagggaagatatgatgaaatccgcagattaacagaagaagcagtcagtttagtgggcgaataggaggagaagaatgaagatattagttaccccaacttctttgcagcccggtaaaaatgaaaaaatactgaaacctctcagagagtttgccgatgaattagtatttaatcctctgggccgtcctttagaggaagaggaattaataaaggctttggaggggtgtgacggatacattgccggtctggacagcattactgcgagagtactggaggcatcccctcaattaaaggctatttcaaggtatggcgccgggtacgatcgggttgatatagagacggcaaagaacaaacaggtaattgttactaacacacccggagtcaatgccgaagcggtaggagaactgacatttgccttattgttgtcaatcgcccggaatattccccacctgaaccacaaattgaagggcggtgaatgggtgcgcggcaatggaatagagctgaagggaaaaactttaggaattataggacttggcgcaattgggaaagtggtagcgcgctgcggccagggattttgtatgaaacttatggcatatgatccatttatcaatgaagagtactgtgcatgcaatcagataaaggtgagtacgtttgaggaagtaatagagcaggcggatgttattagcctgcacatgcctctgacagcggtgacgagacatttgctgaataaagaggtatttgataaaatgaaagacgaggctatcatcataaatgcttcacggggcggacttattaatgaggatgacgcttacgaggcacttaaaagcggcaagctaaaaggacttggtctggatgcgtttgaggtggaaccccctggagactccaaactttttgaatttcctacggttatagcaacccctcacacgggggcacataccagagaagccattgagaatatggcaaaagctgcgattcagaatctgattgacgttctgacgggaaaagagaatcccaatatagttagcaggtaaatggataaatacatactttaaaggagatggaattatggaaatgatgagatcatttattattgaaaaagacgggtccacagagctgagagagattcccaggcccagaattaacaggaaacaggcgctggtgaaaatgattgccaacgggatgtgcggaacggatgtaaagatgctccataggacctttaaaggcttcccggaatcgatttatccgctgatgctggggcatgagggggtaggagaggttatcgaaacaggagaggatgtcagaggctataaaatcggagataaggtgctgctgccatttgtcgatccggatcctgagctttacccgggattgggctccgggtggggagctatgagcgagtatggtgtagtgtgggacaaagatgctgtatatgaggatggggaggaagcacctgactgtgcatatgcgcagacagtactggatccttctgtagatccggtagatgcggttatgctgatcacgttccgtgaagtattaagcaacataagatattttggggttcagccggaaaataatatagtcgtattcggatgcggtcctgtgggtcttagctttataaagttcttaagtcttttaggagtgtctgatgttattgcagttgacatatttgacgataagctggaggcggcaaaggaaaggggagctaccagaacttttaacagtaaagagtgcgatattgtaaaagaaatccgtactatataccccaaaggtgttgactatgtacttgatgcggttggctccccgtttattgtaaaccaggcaatgccgctgattgcagaccggggaaaagtgctctgctatggagttcctgagaaagagcaaattaccatagatttctctaaggctgattataactggcaggttatctaccagcagatgccgagaaaacgagaggaaggcgaagctacggaacaggtgatggagtggattaatgacggtaaactgatcattaaggactttatatcagattattttagctttgacaatgctgtggaagcttatgagaagcttttagaccgccagatttccaaaaaagggattattgtattttagaattgcagaaaagccaggcgcccaaagggctgaggtttcatgtttgtattgaatgagttaaacagatacagtataatgtccatagcaatagttaacctatcacatagtaaatttgacactctcctggtacttgggatggttgagggaatgagatatgtgcgctgccatcctggcggcgcattgggaagacttcgggaatcagaacgcaaaaaagatggctgacaacatgccatctttttttgcgtttagataagactcttcacactgtcacgtatgaccaattccccattcaccgctactttaacataagaagtgcaaggctgatccagctgctgtaccaattgggatacggcctctgctccaaagcgctccttaggtacccgtatggtagtgagctttggctcgatgagggaactgatggggcgatcggcgataccgatgaaggaaaagtcctcaggtatggcgtaacccaattgctgcatcccgcgcattgctccaatggcaactaagtcattgtcagccaaaaaagccgttggtgcatccggagcttttaattgttcggcagccttcaagattccctggcaggccgaatcaatgggataacctacagtataggtgtaatttctcatatcattaataccaaaatgctgtaaggcaatgtcggaccacatctcccgttcctggaaacttctgaatgacagtccgctcctaaggtagcctatgtttctatggccctgactgataaggtattggacggccagatacgtacattgctcattgtttacggtaacggaattgatatctttatcgttataataattatccagaaggacaaaaggaagtcccagatcctggaaattctgaatctcatccccctccatttcagtagcaaatataatgtatccaatacaattggcatccaatatgtactgtatctgcttttcagcttcttttcgttcaatggtaataatgttcaggttatagccgcacttccttgcggctgtctctacgctgtccaggacttccggatagaaggcgtgttcccctaagattttgccgctgtttttaaatattacaaagccaagggttttgttaggcagtgcattggggtcgtgctttataagatttgtataacccatttctttgagtttgtctaatacattggcgcgggttttatcgctgattcccggctttccgttcagcaccagggataaggtcgcggcggatatgccgagttctttcgcaagctctttagctgtcaatatgtgaacctccttaaaactataggcagcaagctgtctgatggtagattctgctgcccgaggattattttaatgatctagctactattatataaataatttataaaaaagtcaatgtcagcctgaaattgcgatatctgtggataagtgcaggtttactcaaagaataataaggcgattaaaaaagtagttgcttaaaggttttctttaaatgatttcgaaatcgtataaaatatttataaatattggtaaacgaaggagtgatggttaagcattacaagaaatgcatatgtgataataaccaaaaataaaagggaataataggataatatacataaaaaatagttattattgggaaatatattgacaaaagtgtttataaaatgtatactccgaattataaattatttataaatgatttagaaaaataaatagtgcacgaaatagcagagtaaaagaaatcacataaaattttatgcagtttgaaaagaggagataagaaaaaatggacacaacgaatattcgctatattatttttgatacttttggaacggttttggattggcaccattccattgtatctcacgggaaagagcttaataaaaaatacagtctgaatattgactggggaacgctcgccattggatggagaaatgatggatattttaaggcaacctttgacatagcccatggaaagcgtgagtgggttccggcagatactatttttacggaatatctggaggaaagaaaagaaaaactagggttacaggtactgtcagaaacagattataaacaattatgccgaatctggcacagactgtctccctggcccgatgtattggaaggattgcacagacttaaaacaaagtatgccattgggcccttttccaacggggattttaatttaatgattgacataaagaaagaggcagacctgccctgggactttataacaactgccgacttatttcaaaagtttaaaccagacccggaagtgtatgtggatgaaattaaattgctgggggcaaaaccggaagaggttgttatggtggcggcacatccctttgatctggacggagctaagctggcggggtgtacaaccatatatgtgccaagaccaaaggagtacggcgaagggacagactataaggaaccggccggaaaagaaaagattgattatacagcggaagactttactgcgctggcagaactgctgaatgcttaaagtgattgatgaaggaaatagacgaaaaggagatacatatgtttaaaatttgggtgattgtagaaattatcagctggctcattgtgttcggtgctgcgcaaggactgtattcaaaaaatactatagacaggaaaggcggggaagagtcattatgatgaaaactacatttataatcttattccttatatatctggtggcaatgggagtacttggggtaaaaggactgaaaaaaacaacggatatgaaatcatttgctgtctcttccggagatgtaaacccttatattgtggcgattacatgggccgctacctttatgagcgcagggacttttctgggtttgcccgggcttgcttataaaaatggggtgtcgctgctgtggtatcatatggggcactggtttcctgctattctaatgcttgccctggtggctggaagctatcggaagcttgcgaacaaaacgaatgcgctgaccatgcctgactggctggctgatgtgtatcaaagcaaggggctgcgtctgcttatcgggattgtctgcctgtgtaatattgtccctcttgctgcccagtttgtaggcgttggaacgctgatgaatgccactctgggaattccctatgatgtaggggtgctgattggtgtcgttgttgttatgatttatctgtttctgggaggtacctatgcccatatttatacaaatgtcgtccagggaacactgatgtgtattgtctctattgtagtggtagtgactggctttgttttgttcggaaacgtgtttacagaagttcccaggatgctgacagagattgatcccaacctgtcctctacatttaatccttcagatgcggcgtttgccggacctgttgcaatcgcaggaatctttatttcaaatgcctgctggtctttgaatcctcagcttatgaataaagtacagtacctgaagacaaaccgtgatttgaaaaaattcattctttttgccggattctgcttatttatcggaggtatggttattgtgggcggtttgtactccagaattctgactcctgatacactggccaacgctgacgacgcgctgcccacttttgttaagatggtatatcatcctgtagtcggcgcgttttttaatgtggttctgctggctgcgacaatgtcaaccacggacggcgttatggtaatgctggctactgtactggggaacacgttatacagacagacctatatccagcataaaattgactgcgggcagaaggtggatgtagagaaagcagacaaaaactctctggcaattgcgaaatggtcagttgttctggtcggtttggcctctctccccatagcatttaacaggcccagttccctgaatgtattaaactggattgggacaggcgtgattttgagtgctgtggcgggtcccctgctagtggcggtaacccagaagaaggttcacaagctttccgctattgtgtctgctgtgtgcggtatctcttcgtatctgattgtctatgtggggaaactagtgttaagtgtgtatctgtctgtgggaatcggatgcgttgtcagcctggcagtggctttcatagtcaactggtggatgatacatcagaacgcggatcaggctgtccagctgcgggactaatgcagagattatataaattgtgtgcatttcacctggcgaatgccgggaagaacatagatatggggaagatggaccattcatttggttatctgtaaaaattgtacgtctgatgcttaggggccccctctccccaatttccgtaccgccgcctgatacgtccggcggcggtggctcctataataaaatggatacccggaagcaaggattacgagcataacttggaattcttgtttgccgaggtcttttcttgatatagaacaaataagtcctctatttttatactaaattccgtgatccaattgtctaattataccataatagaataaacattccgatgcaaaattcttattttattaaggaacagaggtttacttcttatagccaaccagttcctttcaattccagcctttggtgaatataaaaaagcaaggcggtcatagcctcataatgaccttcttgctttttacatcaatttgattttatttttctataacgttacatgacaatatcggtttattaacctaaaatttttttcgatacgtttacacagtatatacagcgatcatgtagtaatagcttactgctccatctgccttcctaaaaaccctgcggctactgcagccacttttttctcagtctcatccattttcacgctgccgtccctgcataataggaggacggctccaatggcatctcccgcgcttgttatagtgtatatggtttgtccggtataagactgactgtcatcctccactattttaataaagttcccgcttgaggtacagctggactttctttctgcaataaagccctccaggtctttattaattcgtctgcccagatattccttggcaccgggacctgcggccgccacaatctggtcatgatctgcaatacaaaccagacttcccatagtggttgacaatgcctccgcatattctttagcgaaggctcccagttccccgatgggggaatatttcttcagaatgatttctccttcccgatccgtaaaaatttccagaggatcgctctcccgtatccgtaatgttcttcttatttctttcggtattacaacccggcctaaatcatcgattcttctgactatccctgtagctctcatacaatctgcttcctccatgctatattttctattacatttttatctgtagataaatgtattatttgtaaaatgaaggaaattatgcttaattcattaatttttacttttaataaaattattcatctttaactcttaaattatagtactttaaggccggaaaggcttatttcttgagcctgttataaccacatatatttttaaaagaaaacagttgactttcttcttctacaaatgtagtatatatttagatactacatttgtagaagaaagagaggaagagttgcatgaagaaagaaattcaaaagttaccggattcagagttggatattatgcttgccctctggaacggccatccggacatgacaagacttgagattgaggaatatgttaatcaaaagaaaaaactggccacgactacgattttatcccttttagcacgcttagaaaaaaaagagttcgtagctgtcagaagagaggaaaaattaaattattataccgcagtagtgaaggaagaggcgtacaggcagcaggaaagcaggactatcattgaaaagctatatgggaattcattaaaaaattttatcgcttctttctatcatggtaaggggttaaagcaggaggagattaaggaattagatgaatacctgcatgaactggagaagggggagtagtttatgatggattttatgataaatctggcaaagattaatttatttgcggctgcctgtgttcttacagtatttgtcctgtccagagtacttggcagtaaatattccgcgcgatggaaatacattatgtggctggtcttatccgtgtatttactgttaccagtgaatttgtcaaagatatctccatggaaggttgagatcccactgcccggagtaactgccggtttgtctgcggacgaggcagatggactgggactggagcatacagctttaaccggaggggagagagcagcggacaagactgatataacaccagaggacagcgcaaggataagtaagggagagcctgtgcccaccggagaaggagggatgcttggggatagagcattgtattcctatgtttttttcctggtttggatcctgatagcagtgggcgtgggaatatgcagagtgttttcgtatcaacttgctgtgaaaaaactataccgctggagcgcacctgagacagacagcagaaggctcagagtatatgatgctgtatgcagagaatatcatataaaaaatgctccccgggcttttaaaaataactttatcacagggcctctgctggcaggtattttcaaagcccgcttatatttgccggagaatacttatacagataaagaactaagaatgatctatgcacatgaactgtgccattacaggcgtaaggatctgtggtataaagcactgcttatgcttgtgaatatcatatactggttcaatcccgcagtctatcttatggtgagagaagcggaacgggacttagagttcttgtgtgacagtaaagttctggagggcagggataagaacgatcactatatatacagcagacttctgctgcacacggcgttaaaagcacacgggagcaaagtttatctgacggcaagcctgcacgatggaaaagcagagtttaagcgcagggttgctaatctaatggtaggggataagctaaaaagggggatagttcttgcctgtgttttagcggtgtctcttgtttccggaagcacccttatggggtgctctgtaggaccgggggaggaggaaaaggaaacagttagcgcagaacagcgggggataccggaagacagtacggttaagaagcctgcagaagaacagacgccgtcaaaggtgattacagcagaggggaacgagaataccgaaaaggaaaaagaacatccagccgcccttaaggagaagctctcggatgaatctgctccggaagccgcggcagaacctgatgccgtagtatttccccaaaacaggaaaacttcttattacaacagcagtgaccctaccgttatttttacggtaacggatattagggaaaaagatattgtatttgatttgatagattatgacagtgagacacctaaagatgaatacggggaagacgcatcctatagagaaatcaagggggcatctggtactcttacagatgaaaatacagtcatttatcaggatcagaactataatcttacgattgtctgggacaccagtgaccctaatctgattggaacagtaaccatcaccggaacatatcctgctaacagcagtctgacaaacggtacctgcataagccaggaggacagtaattctatgcagattaggtgaaaattgtatagatctgcctgccctgaaaggagtttactgggctgaaacagctttataaggcagccaagagtgactacattgacataagagcttagtaaaataaaggagaatccaagatgagattatttgatttgcactgcgacacaatcgttccattgtgcgaccggaaagaggacttttactgccgggacacacagttttctctggcagatctggataagtttcaatgcctgtgccagactatggcagtctttgtgccggatacctgtccgaaaggaggagggaaagcctatgcggaccgttatcttgactatctggaggaactggcggtgcttcagggagatattgccgggctggcagagtcggcggctgatatagaggcccttactaaaaagggtaaatgtgcccttatccgctccattgaaagcgggagggcattagacggcgatttagagaatgtctcgcattttgcgggccggggtgtaaagataatgacgcttgtgtggaatggagagaatgaattaggttcagggaatagagccaatggggggcttacctcttttggcagacaggttatcagaaaaatggaagaagtgcatatgataattgatgcctcccacctgaacgatcccggatttgacgatctgtgcagtgccacggacggcccttttattgcaacccactctaatatgcggagtgtgtgccctcataaaagaaacttaaaagactggcagtttcaggaaattgtaaggagaggaggactggtgggcgttaacctgtacagacactttttgggggaggatggatccggctgtctggatcaggtgtaccggcatgtatcccatatgctggagcttgggggcgaagatgtaattgcttgcggcagcgactttgacggagctgaaatctctccggatttgaactccccttttaagtttggagcggcggccgcgtatctgttatcccatgggatttcccaggctgttatagataaaatgtactttgacaatgctatggcctttctaaagcgcacagaggcataaagagacctggagcactggcataaaagcgcagcccccaggccggcatgtactattttatggaggcagaccccatttcttccaacaatgccttttttaactcgtacaggcgatccgacaagtctacatatacctccgaggggttcataagccgccgggtctcgtcccagagagtatccagttcttttctgcagtaatccctgatttccataacagagggggactggtatacacactcccctttcaggaacaccggtaccaggagttcccgaagagtataggttcccccaacgatttttgtccgtttccaggtgtctatgggatcaaagataatcatatcctgggatgtatcaaaggattcctctgccaggcagatgagatcagctcggatcttcccggtggctttactgtagattctgtaaatggttttatttccgggattggtgactttttcggtattctcggagagcttaatcttgggtgtgaattctgcggcatccttatcccggatggcggccatcttatacacgccaccgaaggccggatgcccgctggaggttatgaggttggtccccacaccccaggaatcaattttagctccctgggtcttcaggctgtcgatcaggtattcgtcgagatcgctggaggcggcgatggtagcatgggtaaagcctgcggcgtccagcattttccgtgcttccttggacagataggccagatctccgctgtccagacgtattccgtagtgagtcagaggatgccctgcgtccttcatctcccggaatacccgaatggcgttgggaacacctgatttcagcgtgtcataggtatctaccagaagagtacatgcgtcaggatacatatccgcataggttttaaatgcagtatattcatccgggaagctcataatccagctgtgcgcatgggtacccagaaccggcacatcaaacatctggccggtgagtacattggaggttcccacgcaccctccgatcatggctgcccttgcgccgaagattccggcatccggcccctgggccctgcggagcccgaattccatgatgcctgcgcccttggcagcgtagacgattctggaagctttggtagcgatgagactctggtgattgataatatttaaaatagcagtctcaataagctgagcttccatgacaggtgctacgactttcaggagcggctcctgggggaagacaacagttccctccgggatagcatagatatcaccggaaaaaaagaagcccttcagataatccagaaaatcctgctcgaagatatgcaggcttttcagataagcaatatcatcgcttgtaaaatgaaggtctttaatatattctacaacctgctccagacctgcggcaatggcgtatccgcccttgcagggattggttctgtagaagacatcgaatacaacaatctgatgggtaggatttttaaaatatccctgcatcatagtcaattcatacaggtcggtcagtaaggtaagattcatagctctcataacaatagctctccttcaaaagatttgtagctattataacacaattccagaaaaaacgtgcaaatatttggtatttttgacagtacaatcggggaaaatggaagaaaaaaacaccggatgcttagatccggtgatattcctccaaggtaagacctgtaagagatagataaagagccaaagatttggatacatatcggatatgccagggttcataggcgtacccggtgacggcctctttgcctttgggatagcggatgacaaagccgtacagaggggcataggctttcagccatttgccggcctgggtttcagcaaattcttctaccaggtcaaaggcaacatcgggacaggagacatccagggcaagccctgtctggtgctcactggctcccgggggagctacaagaagtttacataattcttccggcggagagtcaacggtcagattggctttttttaaagcggcttcatagagctcctcctggcggctgtagggccggtagccggagaccccccagagggtaatctgacagctttttgccctctgaaacaaggcgtgcacagcctttgccgcgtcttttctcaggagccgcttgggatcccctgccggtgcatcaaaggggatggagggttccaccagattctttggaatgtatgaggcaggcaggcggtactcccggtttactagtactgaacaagatgacatgggttccatcctccttatgaaatggttctattataatcttatgcgcctggccaggagaatatgtcttgacgcagacagagaatcccgatactatatgggggaaagagtaaggagacggatgataagatgacagaatatttagtgcgcagatttgtgaaagattatgaggacatcggacgtgaggaggtcaggaccagatatggaattctttccagtatagtgggtatcctctgcaatgtacttttatttgggataaaactgctgattggaatgctgatgcacagtattgcggttatggcggacgcatttaacaatctgtcggatgcggcatcttcggtgatcagctttgtgggggtgaagatggccggcaagcccgcggataaggagcatccctttggccatggaagaatggaatatattgcagcttttatagttgcgttccttgtaatacaggtgggattttcatttttcaaaagcagtgctgggaagcttatgcacccggaggcgataacatttcagttggttccctttttgattctggtcctttctgtgggggtgaaactgtggatgggactgtttaacagaaagctgggaaagcggattaattctaaggttatgcttgccacatcagcagattctatgggggatgcggtgactacatcagctacccttatctccattcttatctgcagatttgcgggagtcaacatagacgcagcggcgggccttctggtatccctgatggttatgtgggccggaatatccattgcgaaggagacactggagccgctgataggggaggcagcagatccggaattatataagaagatatccgaaatggtagaggcttatgatggaatactgggaacgcacgatctgatcgtacataattacggacccaataaaagtatggcctccatccatgcagaggttcccagggatgcggatattgaggaatcccatgagatcattgaccggatagagcgggaagcggccagagaactggggatatttttagtgattcatatggatcctatcgaagtcagggatgaagaagtgctgaaatcaaaacaggagctggaagaggtcctgcagagtattgacgaacggctgaacatgcatgatttcaggatggtgaagggcaagagacaaattaatcttatctttgatcttgtggttccctttgattacgacaaaaaggggcaggaagaattattagataaggttattcgaatgatgcaggaaaaagacagacggtaccagttcgtgatcacggtggatcaggggtttgtgggtacataataaaaaaaataaaaaaaatttaaaaaagtacttgcatttaaattcgttatattgtataattcattttgtcgcgaaattgggctatcgccaaatggtaaggcaacggactctgactccgtcatttcaaggttcgaatccttgtagcccagcttatgaaagtcccaagtcttacttgggactttattttttggtacagagaaatttaccgaaaggtttggatgtattatgccccagggaggctgatggggctaagaagaaaggaaggagcagcatgtattcatttgacagcaggattcgatacagcgaggtgggagaggatagaaggattacgttaaacgccatattaaattattttcaggactgcagcaccttccattcagaagatgtgggattaggaatcgactatctggcagaacataagaaggtatggcttttgtcatcctggcagattgtcatcgacagatatccctcactgtgtgaaaaagtaacggtaagcacctggccctatgatttcagaaaatttctggggagcaggaacttcaccctcacagacggggaagggcagatggcggcctacgccaattccctctgggcatacatggatctggagacgaattcaccggctctggtagccccagagcagatcgaaggctatcaattggaggaaaagctggatatgaactatgcccccaggaaaatcaagcttcctttggacagtcggatacaggaggcatttccggtacgggcccatcatctggatacgaatcaccatgtgaacaacggccagtatgtacagatggcaatggagtgggtgcctgaggacttcaccatccgtcagatgcgggcagaatataaaaagcaggcagtgctgggagatatgataagtcccagggtacatgctatagatggagtgtataccgtagccctttgcgatgagcagggagaagtatatgtgatagttgagtttcaggggacccaaaaggggacgtgttctttctagaaagaacacgtcccaaaatcggactgacctgtcccttttgatatttgtttggagaaagcgaaggagtaaaaatgattcagttaggtaaaaaacaggaattgacagttgttaaaatcgttgactttggggtatatcttggagaaaagactggtgccggggagaaggaaagggtattgcttcccaaaaagcaggtgcccgagggaaccggggaaggggatgttcttacggtctttatctataaggactcttcggaccggctgattgccaccacccgggagccggtggcggagcttggccagctggcggtgctgaaggtggctgctgttggcaagatcggcgcttttctggactgggggctggagaaggatttgtttcttccttttaaggagcagacgaaacgtgtgcacgagggccaggagtgcctggtggccctgtacgcggataagagcgaccgcctctgtgctactatgaaggtttatcattacctgaaaaagaattccccctatattatcggggatgaggtgacgggaagggtctatgaaatcagtgataatttcggagtgtttgtggctgtggacaatcaatattccggtctgattcccaagagggaagcacagggagagtataaggttggagatgttctctcctgccgtgtgaccaatgtgaaggaagatgggaagctggatctcagcacaaaacagaaggcatatatccagattgacgaggatgcggtaaatgttcttcaggtgattgaagaattcgccggggtactgccttttgatgacaaggcggcaccggaggtgatccagagagaattcggcctgagcaaaaacgcgtttaagcgggcagttggccatctgctgaaggaaaaaaaggtaaagatcgagggcggcaggatctataaactgtaagatcaatcttcacgcgagggacaagttatgatataatgagcgttagcgagccatggggagttttgctcacttttggcgagcggtgaatggcgatcatggatttttgcttcctgatcggacagcccatcataggtaagtaactgaaataacagttgaatttttaaaggaggaaattacgtggactcgattgactattatgaccgatacgcgataccttattttgagaaaacagtagacttaagtatggaagagatgctgaagccctttatagaactgctccctgagaatgcggaggtactggacctgggctgcggttccggacgtgacaccctttatatggaagaagaaggaatctcagtaactccaatggacgcttctgcagagatgtgcaaactggccagtatccatacaggaaaggaagtactgaatttaaggcttgaggacatggactttgatgacgtctttgacggtgtctgggcctgtgccgttatcggacattttacgccgaaggaagtgaagaaggctatgaaaaaggtgatacgttccctgaaagagggaggaatcatgtatttttcggtgcggaaaggagacagggacgggcagtataacgggagatatttctgtgattactctaagagaaccctggaggaattggttgagagcctgcgtaatgtggaattaatggatatctggattacagaggatatccgcaaagagagcgaaggcaatgaatggttcaatgtattgcttcgcaaaacggagtaagctatgacacaatttacccatttacatgtgcatacagagtacagcctgctggatggttctaataaaataaaagaatatgtatccagagtaaaagaactggggatggacagtgcagccataacagaccatggggtcatgtttgggtgcattgatttttatagggaggccaaagctcagggaatcaaacccattatgggctgcgaggtttatgtggccccgaattccagatttgacaaagaactcaccgggggcgaggaccgctattaccatctggtactgctggcagagaatgatcagggctatcacaacctgatgaaaatagtatccaagggatttgtagaaggcttctattacaaacccagggtggatatggaagtgttggaagaattccatgaaggaattattgcatcatccgcctgccttgcaggagaagttgcaagaaatattacaaagagattttacgaagaggcgaagcaagccgcattaaaatatgaaaacgtatttggaaaggggaattttttcctggagcttcaggatcacgggatcccggagcagcagtacgtgaatcagcagcttatgcgtatgagtcaggagctgggaattcccctgatcgcaactaacgacgtgcattatacttatgacacagatgctgaatcccatgacattcttctctgtgtccagaccggaaaaaaacttcaggatgaggatagaatgcgctacgagggggggcagtattatgtaaagtcaccccaggagatggaagcgctgtttccttatgctctggaggctctggaaaatacccataaaatagccgagcgatgcaacgtcgagatagaattcggcgtcaccaagctgccaagatttgacgttccacagggatatacggcctgggagtacctgaacaaactgtgctttgacggcctgcgggataagtattccccaaaacgggctgaggagctttctcagcgcctggattatgagctgggtgttatctccaacatgggatacgtggattactttcttattgtatgggatttcatccgttatgccagggaaaaggatattattgtagggcccggaagaggctctgccgcaggcagcctggtagcgtatacgcttgggattacacagctggatcccatccgctatgatcttctgtttgagcgtttcctgaatccggaacgtgtatccatgccggatattgatgtggatttttgctttgaacgacgccaggaggtcattgattatgtggtggaaaagtacgggaaggaccgggtggtccagattgtaactttcggtactatggcggccagaggtgtgatccgggatgttgggcgtgtcatggatctgccgtatgcccagtgtgacaccatcgccaagatgattcccaatgaattgaatattaccatagataaagcgctgaagatgaatcgtgagctccgggagatgtacgaggaagatgatacggttcagaagcttattgatatgtcccggcgtctggaggggctgccccgccacacgtctatgcatgcggcaggcgtggtgatcagccagaaaccggtggacgagtatgtacccctctccagagcctctgacggttccattaccacacagttcaccatgacgacgctggaggagctggggctcctgaaaatggactttttaggcttgcggactctgacggttatccagaatgcccagaagcttgtggaaaaaagtcttgggcatccgctggatctagatgccattgattataatgatccacaggtgctgacccttgtgggaagcggtaaaactgagggcatttttcagctggagagcgcggggatgaagaactttatgaaggaactgcgtccccagagcctggaggatattattgcgggaatttccctttaccgtcccggccccatggattttattccccagtatatccggggaaaaaaccacccggagacaattacctatgactgcccccagcttgagcctattctaaaggcaacctacgggtgtatcgtctaccaggagcaggtaatgcagattgtacaggctctggcaggctacaccctgggaagaagcgatcttcttcgaagggccatgtccaagaagaaggcgtctgtcatggaaaaagaacgccagagctttgtatacggaaatgaagaggaaggggtgcccggatgcattaaccggggaatcagtgaaaagacagctaataaaatttacgatgagatgattgactttgccaaatacgcatttaataagtcccatgcggctgcgtatgcggtggtatcgtaccagaccgcctatctgaaatgctatttccctgtagaatatatggctgctttaatgacatccgtaatcgaaatgccaaccaaggtttccgagtacattctgacctgccgccagatggggatccagattctgccccctgatatcaatacaggagaaagtgccttttccgttgagggacacgatatacgctatgggctgtctgccattaaaagcatcggccgtccggtgatccaggctattgtggaggagagagcagaacacgggccctttaagactctgaaagatttcatagaacgcctgtcgggcaaggaagtgaacaaaaggacccttgagaactttatcaaggcaggagcctttgacagcctgcctggaaaccgccgccagcagatgatggtctatgcccagattctggatggagtcaaccaggaaaaaaagactgttatggcagggcagatgagcctctttgatctggtttctgaggaagaaaagctggagtatgaagtgagaatgccggatgtgaaggaatatgagaaggaaacattgctggcatttgaaaaagaggttctgggcgtgtatatcagcggccatcccttggaagaatatgaacagatatggagaaaaaatataacggcagttacctcagactttatgcctgacgaggagactggtatgcccaaggtttacgacggagcaaaagcggtcctgggcggaatgattaccggcaaaacgataaaatacacaaaaaacaataagacaatggccttccttaccctggaagatctgctggggactgtggaggttgtggtattcccccgggattatgaaaacaacgccatgctgatggaagtagactcaaaagtatttatccaggggagaatctcggtggaggatgataaacccagcaaacttatctgtgaaaaaatcctttcctttgaggcggtacccagggaactctgggtgcagtttgaagatctggaggaatttagaaatgcccgggaggaactctatggggaaatcagcagctgtcccgggaaaagccaggtgatgatctatcttcgttctgaaaaagcaaaaaaaatgcttccctcctctatgaacgtggatcttgaaaccggcattttcgtcaaattgcgggaaaaatacggtgaaggcaacgttaaacttgtagaaaagagtattgaaaaactcatgaaaatgcattagaataggaacgaatagtggaagattgttaaaaaatgtgcagacaattaatggagggataagatgactgctaagaaagagataaaaactatcggtgttttaaccagcggcggagatgccccgggtatgaacgcagcgattcgtgcggttgtaaggcggggattgtccaaaggctgtaagatgaagggcattttaaaaggatacaatggtttgctgaatgaagaaattattgatatgacggcagttgacgtttcagataccattgagcggggaggcaccattctctatacggcccgctgtgcggagttccgtacggaagagggacagaaaagaggagctgagatctgcaggaagcacgggattgatgcactggtagtcatcggcggtgacggatcctttgccggcgcccagaagctggccaatttgggaattaataccgtaggtgttccgggcaccattgacctggatattgcctgcacagaatatacaattgggtttgacactgcggtaaatacagccatggaggcgattgataaggtacgggatacctcaacctctcacgaacgctgcagtattatagaagttatgggaagaaatgcgggatatctggccctgtggtgcggaatcgccaacggtgctgaggatattcttcttcctgaaaaatatgattacgatgaacagaaggtaatcaataatatcattgagaaccgcaagagaggcaagaagcatcatatcatcattaacgcggagggaatcggacattctgaggctatggcaaagcgaattgaggctgctacaggaattgaaaccagagcaaccattctgggccatatgcagcgtggcggcagccctacctgtaaggaccgtgtatatgcgtccataatgggtgcaaaggctgtggatgtccttctggaaggaaagacgcagcgggtaatcggctataagaatggggaatatgttgattttgatattaacgaggcgctggctatgactaagtcgattcctgaatatacctatgagataggtcatgccctatcccacaattacagcaaaaatgtaaaataacagttaagagacattgctcatgaattctttaaaaaatctcggtacaaaattaaaaacagcacaaataattgccctcggttttgcgggggtaatttttgtaggcacaattcttttatatctgccggtatcttcggctcctggagtgcataccacctttattgacgcattatttactgctaccacttctgtgtgtgttaccgggctgactacggtatctacagcaggcaattggtctgtgttcggaaaggctgtgatcctgatattaatccagctgggcggttttggtattatcaccatgagtactattgtgttaatggttgtgggaaagcggatcacgctgaatgacaggaacaggatacgggaatcctttaatctggactctatgagcggccttgccaggctgatccggaagattgtggctggaacgcttattgtggagggaatgggagtggttttatactgctttgcatttatccccaggttcggcgcgggaaagggattctgtgtgtctgtttttaatgcagtatcctcgttctgcaatgcaggaatggacattatgggagataccagcctggcggcgtatgcaaccagccctctggtcaacttcaccaccatcggtctgattgtgattggcggccttggctatatggtttggtgggatcttgtggggacaggcagaagaatcgttaaaaaagagatagaatggaagaaaacctggaggtatctgaacctgaactcaaaacttgtgctgagcagtacggcgattcttattgcagggggggctgtgctgatctttttgttcgagaatcataatcccggcaccatgggagattttaccccgggacagacctggatggcatctctgtttcagtcggttacctgcaggactgccggattttttacgattgcacaggataaactgagagaggcatcggtgatggtgtgtatgctcctgatgttcatcgggggttcccctatggggaccgccggcggagtgaaaacaacaactgtctgggtactggtcctgacagcggtaacttttctgcggggaaagaaggagacagaggtattccggaggaaggtgtccgatacctacatccgtacagcgctgattgtggtgctggtaagcttcagtgtcctttttatatccgttgtggggattaccctggtgtcggatgctccctttctcgatattttatatgaaatgacttctgctgtggggaccgtcggtctgagcaggggactgacacctaatcttaccgcagcgggaaagttgattgtaattcttaccatgtatatcggcaggatcggaccggtaacactggctacggcggtaacgatacaggcccgcaggcagacctcgaatatacacctgccggaagaaaagatattgatcggataggaggaacgtgatatgggaaagaaatcctacgcagttatcggcttgggtaagtttggatatgcagtggcagagacactggcaaaagccggctttgaggtaatggcagtggacacagatgaagaaattgtgcatagcattgccaaggaggtttcctatgcggcccgggcggacattacagagacgggggttctggaatctctcggaatctccaatgtggatgtggtggttgtcggggtcgccgagaatatggaggccagtattatggctactatatttgcgaaggaggcaggcgttaagtatgtcatggcgaaggctgtgaacaagctccatgcaaccatcctgaagaaggtaggcgcggatgagattatccatccggaatggtccatgggaaccagggttgccaagaacctgatgtcagggggattcgttgacttttttgagctctcctccaagtttagtctggctgagctgccggtgcccgaggaatgggcagggaagactttaatcgatctgaacctcagggataaatttggggtgaatgtagttggcgtaaaggtgggagacgatgtgcaggtaaatgtaaagccggaccaaccgtttctcagagagcagacgttaatgatagtaggtgagaatgagagtcttgccagattgcagaggtaggtggaagatatgattaccagtacatccaatccccagattaagaatattatacagctggagaaaaagcccagggcccggaaggagcaggggctttttgtggtggagggcagcaaaatgttcgccgaggccccacgagataaaattaagaaaatatattgttcccaaagttttctggaaaaaaaggaacacagagatttgctggagagtaaggggttcagcccggacagtcaggggacagaagtggtggaggacagagtgtttaaaggcctttcggataccatgaccccacaggggattctctgtgttatgcagcagatggagtataccctcgaggaggtccttggggggaataccaaagaggggccgcccttcctgtttcttctggaagatctccaggatccgggtaatctgggaactatcctgagaaccggagagggggcaggggttaccggtgtgataatgagcagaagtaccgtggacatctataatcctaaggtgatacggtctaccatgggctctgtctaccgggttccgtttctctatacggactctcttttggagatactgccccgtctgaaggatgcgggaattactacctatgccgcgcaccttagggggaccagcgactatgacaggcaggactataccaggggtacaggattttttataggaaacgaggggaacggcctgtctgattctctgtcttttggggcggatgtgaagattagaatacctatgtgcgggcaggtagagtccctgaatgccgctatggcatgcgggatcctggcctatgaagcatacaggcagagaagaggttaaaggaggcggaacataatgaaagaaacgggtattttgctcccagtggcatctcttccttcctgtacgggggttggagaactggggacttttgcatatgaatggattgacatgatagcagaggccggggcaggaatctggcagattcttcccttaacccctctggggtatgggaattccccttatcagccctactcttccagggccggagatgaaatctatatcagtctggaggaactgaggcaggaggggctgctgacagacataccaccggctggtccctggaaagacgggcagcgtatccggtacgggaaagtgagagcgtataaggatgccattttgagaaatgcattttcagcttttcaggaggatgaagaatatctgaagtttgcccggcaggactgggtaagagagtatggagtgttccgggcgttccgcagggctgagggggatgcctgctggaatacctggcctgcagagcttaaggcatggccggaggaaagaacggcagatgtaatgccttatgaaggggagattcgataccagatattccttcaatatgttttttgccgccagtggatgaagctgaagcagtatgccaatgaaaagggagtccggattatgggggatgttcctttttatgtgggggtggactctgtggatgtctgggcgcagaaagagaacttcctcctggatgcagaggggaatccgtcttttatcgccggggtgccgccggattatttcagcgccgacggccagaggtgggggaatccgatttatgactgggactatatgagagaaaccgggtaccgtttctggacagaccgtatggagtataacagccggctgttcgacattatccgaatcgatcacttcagggccttcgacacgttctggaagattcccgcctcctgtcccacagccattgaaggtgagtgggtggaggctcccggatatgaggttttagacaccctttaccgggagattcccgagatatcccttgttgcggaggatctgggagaactccgcccccaggtccatacgctgaaggaacactatcatctgaagggaatgaagattcttcaatttaccatagacacccaggggaaatatgccagggataggttcagggatacagaaaacatgataatctacaccggaacccacgataatgacacgatccgcggctggtatcaggagcaaacagctgccaaaaaacgtaaaattcgccgatttttgaagaaaaatggttttaaaaacggaacccctgccagccgtctcatagcctatgccttgtccagtccagccgaatacgcgatcctccccgccgcagacctgctggagtacgacagccgtgcaaggctaaacaccccatccaccgtgggaagccccaactgggagtggaaacttccggattaccaggaaatgcggcaggcactaaaaaaatggaccccatattttaacagaacataacaaaaaataaaaagtatcgtcttgtatatccaggaaaccggcagggcccggggatggcaaggcaaagcacaggcagagatgcgcagactgcggaatgcgtccgaagatccactgccggcggtcacttagaatcgaaggctctcctgagattcttagtgaacggccaggcagttagctgaggagaaatgaagcagcaagcatctctgcctgtgctttgccttgccatccccgggccctgccggtttccgtcccctccccttcctttccaaaaagtgacagaaaatacccgcttgacaataatacgtaatcttgctacaatacatccgtaacaaaaattaataagtttgtaacaatttcaaaaaacaaaattaaaatttatagaaattgttcaggaggtaagtatgagagcaagaacaaaacatgtagtatacagtatgggcggtgcgctggcgttgtccctggcaatgacagttcccacctttgcggataccacaggcgatacccccgataacacccagacagaagcggtctggacagataaagtagcagcagatgtgaacacttatgccaatatccgggtggatgcatctatcaacagtcagagagtcggacgtcttcccaaaggcggcgtagccgtagcggttggggaaaaggacggatggattcaggtgtcttccggtgatgtggaagggtacatacgcggagaccttctggtatccgaggaagcagcaagagatctctatgttagtacctatggcacggaagacatatctgtatgggcagaagtaatagaagcccgtcctcaggaggcggaagcaccccaggaggagccgggaagccaggaacaggaaagtgaagagaccgcggagacagcagtttccgtcagccaggatgacctggatctcatggcggccattatagaatgtgaggccggaggggaaagctacgaaggaaaggttgcagttggtgcggtagttatgaaccgagtaaacagcagcaaattccccaacactatctctgaggttatctaccagagaggccagttttcaccggtggccagcggaaaactttcccgtgtactctccagaggggccagggaggactgttacgaagcagccagagacgtattaaacggagccaacacagttggagataagctctttttcagcgccggaagcggcaagggaatacagataggaaatcagcatttttattaaaaactaaaaagggacagggctgtccgattttgggacaccctgagtgcaaaaggggacgtgttctttttcaaaggaacacgtcccccattgtatttttgtgtctgttatagtatgatataacaaagaatgagcaaaaataataacggacaaagaggggtgatattatgcaagtacctattatatggcttgtgattctggcagtactgttgattattgagattgcgactttggggcttacaacgatctggtttgccggcggagccctcgttgcatttcttgtttccctggtgggaggtcctttgtggctgcagattacactgtttattgttgtatctttcattcttttagtgtttacaagaccggcagctgcccgattgctcaacaagaaggtggaaaagaccaatgtggaaagtcttcccgggcagaaggcagtggttcttcaggagatcaataatattcagggaactgggcaggtgaagatgaatggccttgagtggactgccagatcccagaacggcaaaattattcctaaggatgcgattgtaaatgtagtaaccgttgagggcgtaaaactgattgtagaagaggagaactagttatgggatttatcgttttattagtctttatcatcctggcattgattgtactggcatcttgtgtaaaaattgttccccaggcacatgctcttgttgtagaacgccttgggatgttccggggcacttggggcgtaggcattcattttaaaattccttttattgagagaatagccaagagggtgaatctgaaggagcaggtggtggattttgccccccagccagttattaccaaggataatgtaaccatgagaattgatacggtagtattctttcagattacagacccgagactcttcgcctatggcgtggagaaccctattatggctattgagaatctgacagctactactctgagaaatattatcggcgatatggaactggatgagacccttacatccagagagattatcaatacaaagatgagagcatccctggatattgccacagacccatggggcataaaggtgaaccgcgtggagcttaagaatatcattcctccgtcagctattcaggatgccatggagaaacagatgaaggcagagcgtgagcggagggagtcaatccttatcgctgagggtgagaagaagtccaccattttggtagcggaaggtaaaaaagaatccgttatcctggacgctgaggctgagaaacaggctgctatcctgagggcggaggcagagaaggaaaagatgatccgtgaggcagaggggcaggcagaggcgattctgaaggttcaggaggcgaatgcacagggaatccgcatgatccgggaggccggagctgacaatgcggtgctgaccatcaagagtctgcaggcattcgaaaaggcggctgacggcaaggccactaagattattattccgtcagatattcaggggatcgcaggacttgcatcctcgctggccgaggttatgaaggataaggaaaaatagaaaccgaacatcgggaacggaggtatcactgacgatacgtccgttctttgttatcctgaaccacaccggacagtaaaccagtcaaattgcagcagggaggcagtcctatgttaccagtaatagacatgacaaaagaatatggaattgtgcttgaggggggcggcgcaaagggcgcatatcagattggtgcgtggaaggccctggtggaggcaggtgttaagatcaaagggattgcaggcaccagcgtaggggcactgaacggcgctcttatgtgcatgggagatctggaaaatgcggagcaagtgtgggaaaccatatcatattccaggattatggatgtggacgatgagaaaatggcgcagctgtttaacggggagctgggccttgcggaagccctcagcgatggcctggcatttatgacggaaggaggggtggatataacccccctgaaggagctgatagccaaaaatattgacgaggacgccatccttgcctcccccatagagctctatgtactaactttttgtgtagatgagctgaaggaactggatgttgatctgaaaaaggtagacaaatctctcatgaaggatttcctcctggccagcgcctatttgtttcccgtatttaaaaatgagaaaatccggggaaagagatatattgacggaggggccataaacaacgttcccctgggctccctggtggatcggggatacaaagatattattatgattcggatctatggagtgggcagagaaaagaaggtaaaactgccggaggatgcgaatttgattaccgttgctcccagagttcagctgggaaatatcattgattttgacagcaagaagagccgaaggaatatgcggatcggctattatgatgccatgcgggctatctacggcctgggggggcgaatatattatattgaagaaaatcaggaagagtgttattatttaaagcagctgattgacgtggacagaatcattatggactatcttctggaaacctatcacatggaaccggcagagggaatggaagtgagaacgcttatagaagtgatactaccagccattgcatccgaactaaagctggggaaggaatggacttacagggaattgtatctgacaatgcttgaggccacggcaaaaatgtgcagagtgcagaagtacagaatctatacgctgaaggaactgcaacatgaggtgaacagaagactgtaccgtcttgtgggagatcctgtgcctgcgtttgtgcagataatttctaaggatatattaatataaataagcaggaggataagagaatgaatttaaagggacgtaattttttaacactaaaggatttttcgccggaggagatccaggggcttttggatctggcagctgatttaaaggctaagaaaaagcaggggattctgggaaacagcctgaaaggaaagaatattgcactaatttttgagaaaccttctacccgcacaagatgtgcgtttactgtggggtgtaccgatgagggcgcgcatccggaatatctgggaaccaacgatatccagctgggagccaaagagagtgttgaggatacggcgagagttctgggacgtatgtttgacgggattgaattccggggattcaagcatgagcacgtggaaatgctggccaagtacagcggtgttcctgtgtggaacggacttaccgatgactatcaccccacccagatactggcagattttctgactatgatggaacatctgggaaccctgaaaggactgaacttcgcctatctgggggatgggagaaataatatggcaaacagcctgatgattggctgcgccaaaatgggggttaatttcacaattatagcgcccaaggctctgtggcccaaggaggaactggtggagatctgtaagggatatgcggaccaggccggatctgctataaccctctcagaatccacggatgatgtggcaggggcagatgtcatttacaccgatgtgtggtgttccatgggagaagagagcaaggcagcagaacgtgtggagctcctgaagccttatcaggttaatgcggagcttatgaaaaagaccggaaaggacagcacgatcttcatgcattgtctccccgcggtaaaaggaaatgaagtgacagaagaggtatttgaatctgcccagtctgtggtatttgatgaagccgagaaccgtatgcacaccattaaagctgttatggtggcaaccttaggagagtagctgttctattatgaaaggtgaactattaaggatattgagggaggcgccgggatacgtttccggacaggagctgtgcgagattctgggcgtctcccggaccgccgtgtggaagacgatcaagcagctgcgagagcagggatatgttattgaggctgcgcagaataagggttatcatatggttgaggctccggatgttatacaaaaaggagagattataagccgtctgaatacccggtggctgggacagaatcttttgtatcaggatgaggtggattccactaatacctgggccaaaagggccggggaggacggcgcccccagcggaaccgttacggtagccgatgtccagacaaaagggaagggcagaagggggaaaagctgggtgacccccagaggaacgaccattgccatgagtctcctcctacgccccgagttcggcccggaacaagcttccatgcttactatagtggcgggactcagcgttgcccaggccatagccggggaaaccggattggaggcacagattaagtggcccaatgatgttgtagtggcgggaaaaaaggtgtgcgggattctcacagagatgagcgcgcagatggggtatattgaatacgtggtcaccgggatcggcattaatgtgaacacgaaggaatttgccgaagaaattaaggatgtggctacttctctttttttggaaagcggcaggatgtacagccgcgcggctctcatagcaggagttctaaaacggtttgaggaaaactacggacgttttctggagtcaggggatttgaagcttcttctggaggactaccataagcatctgattaactgcggaaaagagataaaggtgctggatcccaagggacattattccggcatttcccatggaattaacgagaaaggggaactgctggtggagagaacggacggaacggtgaccagggtctttgccggtgaggtttctgtgcggggattgtatggatatacagagtaagaattgcagaaaatagaggtaaggttatgtatgatgacagagtagtattgtgcggtgcaagtgcatatgaggaaaaatactattttaaccaggattttgccgcccttccccagtccattcaggatgagctccatatcatgtgtgtgctgtttacacaggatgtgggcggaatactcacactggaatatgatgaggacgggaacctggaatttaaggtggaagcactggaggcggatgccatgtttgatgagattggcagcgcccttaagataaaagaactgcagagaactaagggagagcttctggaatccctggaattatattaccgggttttcttcctgggagaggatatggaagaggacagacaagatacaaaataagaggaggagatgacatgctgctagtaatcgatgtaggcaataccaacattaccctgggggtattccgggaaaaggaattgatggggacctatcggatgaccaccagaatgtcccggacatcggatgaatacgggatactaatgtgtaatatgcttgagtatagagggatctcaaggcatgagatcgaagatgtcatcattagttcggtagtgccggatgtgatgcactcactcagcagcagcattatcaaatactttgacataaaacccattcatgtaggacctggaacaaagacaggcatccgggtaagcgcagtaaatcccaaggaaatcggagcggaccgcattgtagatgccgtggcggcatacacgctgtacggcgggcctgtgcttgttcttgactttgggacagctactacctatgatctgattacggaggacggaagttttgtggcaggtatcacttctcctgggatcgagatcagcgcccgggctctttgggaggacgcggctaagcttcccaagattaccattgaaaagcctgtctctattctggcaaaggagaccatcaccagcatgcaggcggggcttgtgtacggatacattggacaaaccgaatatatcattaagaaggtaaaagaggagtccggcctcattaatctcaaggtagtggcgactgggggactgggaaaaattatagcggatgagacagatatgatcgacatctatgacacgcagttaacccttaagggactggaaattatttacgagaaaacaaagaaagacagataggtagcaaaatcatgcagattggcaacgtagtattggagaataacctgattctggcacctatggcaggggtaactgacctgccttttcgtttgctgtgcaaggaacagggggcggggcttctgtgtatggagatgatcagtgcgaaggccatctatttcggaaacaagaatacagaggcgctcatggaaatagatgagagggagcgccctgttgcccttcagctgttcggatcagatcccgatattatcagtgagatggcgaagaaaatagaagaacggccctttgacattctggaccttaatatgggctgtccggttccgaaggtagtgaataacggagaggggtctgctcttatgaagaatcccaggctgattcacgaaatagtgagcaaaacggttaaagcaatttctaagccggtaaccgtcaaaatacggaagggttttacagaagacagtgtaaacgcagtggagacagccaaaattatagaggatgccggagcggcggcagttgccgttcacgggagaaccagagaacaatattattcagggaaggcagactgggacattatacgccgggtaaaagaggcagtatccataccagtcataggaaacggggatgtagactcccccgagcgggcaaaagccctggtggaggagacaggatgcgacggaatcatgatagggcgtgccgcccgggggaatccctggctgtttcaccagattctccattacttccgcaccggagaaacagaacccaaaccgacagcggatgaagtgtcagatatgatactccggcatgcccgcctgcagatagcgtgcaaaggggaatatacgggaatccgggagatgagaaagcatgttgcctggtataccgccggctttccccattctgcaaggctgagagagagagtaaaccagatcgagagtctggaggacctggagagggacgtgttccttttaaagagaacacgtcccaaatgagggatggcctgtccctttttgagagtggcctgtccccaattgcgacttcatgaaaaaccttgacaatccctctggtatccgctataatactgtgattgttaaaaggaaaagtctaagcatttatcacataaattttaacatgaaagacaagaattttaatatgtaagaaagggtgtagaataagacatggaagaaaagaagaacttgcttacctatgggggactgaaaaaattagaggatgagcttcaggacctgaaggtataccgcagaaaagaagtggcacagaagattaaagaggcgagagagcagggggacttgtcagagaacgctgaatacgatgcagctaaggatgagcagcgcgatattgaagcccgtattgaagagattgagaagattctgaaaaatgcagaagtcgtagtggaagatgaagtggatcttgaaaagattggtgttggatgtaaggtaaaggtacacgactttgaatatgaagaagatattgagtttaaaattgttggctctacagaggcgaacagtctggaaggaaagatttccaacgagtctcctgtgggcaaggctctaatcggggctagagcaggggaaacggtaagtgtggaaatgccgtccggcattatagaatataaagttctggaaatacagagaaacgtataagggagtggaaaaagtggcacagcagcagaaaaatgcacaggaacaggatattaaccagttattaaaggtgcgccgggagaagcttgcggacctccaggcaaacggcaagaacccttttgaaattgtaaaatacgatgtaacacatcacagccaggaaatcaaagataactttgagtcgctggagggacagacggtaaacattgccggccgtatgatgtccaaacgcgttatgggaaaggcatccttctgcaacgtacaggatctgcaggggggaatccaatcctatgtggccagggacagcgttggggaagaaccctacaaagattttaaaaagatggacattggcgacattgtggggatcagaggcgaggtatttaagacaaagacaggtgaaatctccctccatgctgcggaagttacgctgctgtccaagagtctgcagattcttccggagaagttccacggattgaccaacacagatctccgttaccgccagagatatgtggatctgatcatgaatgcggaagtcaaggatacttttatcaagcgttctcagattatcagcgccatccgcagatacctgggccaggaaggattcctggaggtggagacacctatgctggtatccaacgcaggaggagcagccgcccgtccctttgagacgcattttaacgcgctggacgaggattttaagctgagaatctctctggaattatatttaaagaggcttattgtaggcggaatggaacgggtatatgagattggacgggtattccgcaacgagggactggacacaagacataacccggagttcaccctgatggagctgtatcaggcgtacactgactataacggtatgatggaccttacggagaatctgtaccgttttgtggctcaggaagtactgggtaccacaaccattacctacaatggcgttgagatggatcttggcaaaccttttgagcgcatcactatgctggacgcggtgaagaagtatgccggcgttgattttaatgagattcataccctggaggaggcaagagcagctgccagggaacatcacgtagcgtttgaagaaaggcacaaaaagggagatatcctgagcctgttcttcgaagaatttgcggaagagcatttgatccagccaacctttgttatggatcatcccattgagatatctccccttacaaagaagaaaccgggcaatcctgaatatgtggagcgctttgagttcttcatgaatggatgggagctggccaatgcatactcggagctgaacgatcccatcgatcagcgggaacgcttccaggcacaggaagagcttcttgctcagggtgatgaagaagcgaaccatacagacgaagatttcctgaatgcactggaaatcggaatgccgccgactgggggcatcggattcggaattgaccggatggttatgctgctgacggattcagcggctataagagatgtgctgctgttccccacgatgaagtcactggacacgaaaaagggcgaggcaaaggcggaaaaagctgttgcaccagaagtaaaaacagaggagaagcctgatttttctaacgtgaagattgagccgctctttgaagaagtggttgactttgacactttcagcaaatctgatttccgcgctgtgaagattgaagcgtgcgaagctgttcccaagagtaaaaagcttttgaaattcactctgaatgacggaacagaccgaaaacgtacaattttaagcggcattcacgaatattatgaaccggaagagctggtgggaaagacggcgattgccattgtaaatctgccgccgagaaagatgatgggcgttgattctgaaggtatgctcatttcggcagtacatgaggaagagggcagagaagggttaaaccttctgatggtagatgaccggattccggcgggagcaaagctgtattaaaacctggcgaaccagtaagcgaatagatggtacggtaaaggacacttttctaaaaaaaattttaggaaggtgtctttttgcatgcgccgctcagaaaaaagccggaaccgtaagtgcgaaaaggcatgctagggatggtggagaatttccagacacttagggtacatatagaaataattaacaaggggacattataccaaactattggtgcggatgttcccttacttttatttttgaaacatttcagtgttaaaggctctgaaagcaggcccaaaagagcctaaaatagggggttgtccggttcatgcatgtaaacggtgaaataatatttctggatgaatgagaaatattatttcatgtaatttcgtagtaaacagaatgatgttgtacattatgcacaaaaatgaatgatatgaaagcttaatattgacttattgtaaaatagtgataaaataaaattacacgatgaaacagccaaacatgcataacaaataaaaattgacactgaaactaacaaatttcgacagtatatgaaattaaattacatgcatgggggcgaaaataataaaggggtttcctgtatcatccaaagacaggggctcccgggaaaggtggctgatagacaaaccctcagcaaataagattactgattttgccggttagtaaaaatcttatggaacagcggaggtatgaaatgaattgtaacacacaggacgcgaacattgcagaaaggcacagcaagaccgctgtgatccccggcatggagttgaccggcatctatgcagagaaatgttcattcatttcgctcattgctctgagaactgagcaaaatgaaaaaagtaaaatatttgactaaattagggaggagtcattatgaaactgagtacaatcatgaaaagaggacttgccgttggtttgatgggtattatgatggtaagtctggctgcctgcggagacaacaaggaagaagaaaaaacaaatgcccaaacagataccaaaacggaagcaaaagccgatgaaaccggatctgacgctaaaagtgacgtgacgctgaagttccagcagtggtggggcgcagaacttccggagggatatctggatgatatttgtgccaaatatgaagaagagacaggcgtgaaggttgagctgttaacagcaccatgggcggatacaaagacagctatcacagcaggcgcaacaaatggcaccatcgcagatatcataagcgtggatggtgcgtggctttcagaatttgttgacatgggtgttctgaccaacgtagaagatgcaggtgtagacagcagccttgcaagtgacatctggaaagtagatggtacaggctatgtggttcctgtcctgaactttgcatatccgatgtatgtaaatatggatattctgaaagaggccggagttgaaacagttcctaccacatggactgaactgagggacgcatgtaagaagattacagatgcaggaaaatctgcattcgcgttaaaccttggaaccacaaacgctaatggaatccagaacgtatttatgggaaccggctggggttcaggaatcagtctcaaggatgaaagcggagcatacaagacaaaagacaatgcaggtctggcgtctctcgctgaaatgtttaaggggctttacgatgacggttctttatatccgggtatgagcacactggaagagtctgagatgacaagtaactttgcagcaggcaactgtgcatttacagtggcatctgcagctaccatgagccagtttactgacatcaatttcgaagctaccacaatcccggtaaaagatgatttcaaggataagagcggtatctgctatgcaagctgggcagtaggtatttcagattcctgtgaaaacaaagaagaagcagctaagttcatcaactacctccttgggggcattgatggaaaagatggttctgcatctgcaggtctggcagctacaatgtcagcattcccgaacagtacggttgctgaaccggattacagcaaggcgcctaaacagttccaggattactatgagttatacaaacaaaattatgtaatcaatgaatttattggacttcctaacgcatccgatgtaatgacctctatgacaaatgatctgaccacatatcttgaaggtaaaattgacatcgatacactgctttctaactggcagggttaccttgacgccgcaggaaagtaaataatgaggaagtaaaataagaatggggagcgggggtaatccctgccccccatttctaagaagcagctttaactttagtgaaagaatctttggtccataaagttaaaataggataataggagggactgattttgaagttaacaggaaagaaaactgcaccatacagatatcttgccccgacgatactgcttatgattgtttttatggtaatccctatctgcatggtaatcggttactcttttgtggataaagctgtcgtctcgcagaacccgcagtttatcggattagaaaattataaaacaatatttgcagacaacgagtatataggagcaatttctaataccataatttttgtagtggtaagtgtagttgcgcatttaattctgggcatgctgtttgcaatgctgctgaattccaaatattttaaaagcaggacaaaaacaatagcccgtgttatttatattcttccatgggtatttaccgcatccgttgttgcgattctgtggaaactgatgttacagccgtcgggtattgtaaattatctcctgtcgatctttccgcagatatcccgaaataccgagtggctgagcaacagctcaatcgcgctggctgttatctgctttatcaatatctggtgcggatatccgttttatatgattagtattcttgcaggcctgcagggaatctccggagacttgtatgaaagcgcggctattgacggctcaacggctgctaagagctttcttcatattaccattccgcaattaaaaccgattttgattagtatcgcgatgttagattttatctggacgctgcagtcctttaatgttatctggatgttaactgggggcggtccggtaaatgcaacagagacgttgagtatatatatttacaaaaaagcgttccagaaggtggattatagcatggccgcaacggcagctaccatattgctcgtggtctgcatatttattgcagtattctatgtgagacagcagaagaaagtgagggaataggggatggttggaagttataaaaaaacaacgaaggtcatagtttctattcttttggttttggggggcctgttctcagcatttccaatattgtggatggtctgctcttccctaaaatcgaattcagaaatcttttcatggcctcccaaatttttggataagacagccagcttatcgtcctacgcagcagtgctgacggactccacaaaggtaagattctttataaacagttatatcgtggcgggatgtgtagtgctgctgactttgtttgttggaatacttgccgcatatgcattcagcagatttgattttccgggaaaaggcgttttcaattcgctgattgtcagcgttcaggcaatcccgcccattgtactgctcataccgtatatgggtctgattgtggcaatgaaattgtttaatacatattttgcgctgattcttacctatctgatcactacgctgccctattgtattttaatgatgacaggttattttaatactctgtccagggaactggacgaggcggtcatgatcgacggcgggtccagatggaaagctctttggtccgtattagtaccaatatctataccgggaatggtttccgtaggaatgtacacgtttatgcaggcatggaatgaatatctgtttgcgctggcattgacgcagacaaccgatatgcgtacggttccaattggtatcaacttgctgatgggccagcatgcatatgactggagccagatgatggccatgagtgtgctgggatcgatacctgtgctgattctgtttatctttttccagaaatactttatagccggcatgtcttccggcggtgtgaagggctgatggaaaatggatatatatattaatttaaagaaaagaggagaataattatgttaatgaacatgaaacaattacttgccgtagcaaatgagaacaactttgccgtacctgcattcaacattagtgactacaatatgtttaacggcattatggaggcatctgaagaaaaaaatgcacctgtgattattgcaattcacccggacgagttaagtcatattacaccggagatggtaaaggggattgttgagagagtacataattcttccattcctgctgtgatccatctggatcacggcggaaccttcgagcaggtgattaccgcaatccgcgccggatttacctctgtcatgatcgatgcttccagccagccatacgagggaaatgttgctacatgtcaaaaggtctgcgaggcagctcatggggttgacgtctctgttgagggggaacttggcaccatcggtaatacagattctgtggaaacaacggcaccggatgagatcttatatacagatcccatgcaggcaaaggattttattgagaaaacagggattgactgtctggcgattgcaatcggaacctgccatggtatttatccgaaagataagaagccggagctccgtattgatattctggatgagattaaaaaggttgtggatgtaccccttgtacttcacggaggatcttcgaataaagattccgaaatcgcgaaatctgtagagcacggcgtaaataagattaacatttcaagcgacattaaagcggcttactatgagaaaatgagagaggttcttcaggatgcttctcttcgcgaaccaaaccagattcagccgccctgcgtggaagctatgaagaaagtcgcttttgacaagattgaactgttccaggcatcagggaaagcatcactttactaaaactgagcactatatgagaccgaaggagactgcagaatgaatgagaaaattgctttgggctttcatacctgcgtagattatgagctgaagtgggatacacaggttgcagaagcgcagattaaggcatttgatatccacgcggatgaactgaaactggatatcgaagttgattcagaacgcgcaatttggattatgagtcttgcacatttgcaggccggaatcggatgtgagatggttccggacacatccaagatgtgtgtggagtttgcaaatcattttgaatatgaggtgaccttgggagggacgcctacccgtgccggcattattctggatcgcctgggctatcccagtgtgctgcaaaccagctgctacaatgaacatgtaaaacggctgatgccgccgggtatccgcgtcctgccgggggtggggccggatcagaacgagatatatccgcacgttgttttgcagtgccataagggtgtgaggattcaggcaaatgacattgattttgttaccccaagggaaaacaggatcttgatctcaagggatgaagacagtctgcatatgcctgttctgccggatgagttcggaaaaatgatcggaggatgccaggtattcctgctggggtcattttcggagcttctggattcggaggtgctgagagacaggatggagaagacaaagtcactgctgtcctatctgccgggggatgcggtagtggtaatggaggacggatgttatgtaaaaaaggaattccgcacctatgtccaccggcagctggcgcctcagattgacgtgctaagtatgaatgaggacgaactgcagcagtatatcggaaagacaattgatatactggacgcaaaagcagtggaagatgctgtgaaatatgtctatgacaattccggcatcaagctgattctggttcattctgccgcgtgggcactggtttacggggaaaatgcatgcacaatgcgggctgctctggaggggggagttacgatggcggcaacacggtttagaatgggagacaactttacagtaaaagactttgaacagaccaaagacataccggataaaacagaaggtgtggcattttgtgagaggatgagagagagtttgggagacaagatttactgtatcccctgtaaagatttgagctatgtggagaaaccgacggtagtcggcctgggcgattcatttgccggcgggcttctgccggggctgctgaaggaaagcagattaaactagacatcatatgaaggagaaaacacaatgtatgaaaaaacagaaaatatattaaagatggcgaaggagagcaatactgcggtaatctcattcatctgcatggattatacgatggcaagatcggttgtatatgctgctgaggcagctaacacaccggccatagttatgctgtacccggagcatgttaccgttcagcatacaacaggatttgcaaattatgcggccatggtaaaggaattggcaggcgaggtgaaagtgcccattgggctgcatgcggatcacgattttacgtatgatgcaattatgaataccataggggcagggtttgaatctgttatgattgacgggtccatgaacgacctggataccaatattgcactgaccaaaaaagtggttcttaaggcacacgagctgggtgtgtgtgtagagggcgagattggtcacgtgggagcggcggcagcctctgacaatgcgaatgaggatctgtatacaaaagcggatgcggcagaaaaattctgcagagagacgggcgtgaattctctggcagtttctatcggaaatgcacacggtgaatataaggacactcctcatctggatataccgcgtctggaggagattcatgcggctactgatgtatccctggttctgcatggaggaagcggcataccggatgaccagctgctgattgctttttcaaagggaatcaataaatttaatctgggaacagaatttttgggcaaatattatgatgccgtagctgcgttttctcttgagaatgcagaaaacccggatccggtgaaaattattaatcttccggagtacgtgcagggaagattacagccttacttagaggagcgtctgaaaaccctctgccatttttagacgaaaggggcaaaagatgcaaagatacaggtgcccgcgggaatgagggtgacagaggatagcttatgtgatattattaaatcaataattattcgcgaagtatttacaaaaataacgtatggagcagagaaccttgaagaatgatagtatattacagatggaagtacttgatgtgataaaacaaaagtacggcgagatatttgcagcagaaaaaaaggtagctgactttgttttgcagaatccgcagaagacagtagactccaatgtctcggagatcgcaaagcaaagcggagtaagcgatgctacagttgtgcgcatgtgccatcatattggatacacaggatattatcagtttcggattactcttgcaagagacttaggaaagaaacagtacgaggacatagtgattccaaagagtatcggggcgatagaaaagctgtttcacgactatgcggagaatatgattgcaatcggcagaagaatggacgcagaaattatgtggaattgcgtgaatctcctgaaaaaatgtaatgtagcgcatataatcgctatcggcaatacgtgttcgatgtcacaatatatgggatttcggctgggaaggcttgggatcaggagcacctatggctcctctgcggaattttttatgaaccatgtgaatcttgcggaccaggatgatattgtgatagccatatcaaaatccggtacgtcaaaaccggtcattttgggaatggaattggcaaaggagaagggaataaagatgattgccattactgactatgcagaatcaccggtctctgaactcgcggattatgtgctgctgtccagcggggaagataagccctttaactattacaaggattatgcacagacaaacctgatggcgactattgatgcacttttgaactttgttaccaatgaggaatggattaagacaaagcaggcagacaggcctgagatgatcttatcagagtataagctataaatttgctataggcgaggaaacagatagcagggacaggtgccctgctatttggatattaagaaaggatgggttacagtatgaaacgttcaagaatcaatgaagtaattaaggatatggaggcattaattgcggaacatagatttgagataccgccgtttgcaaaactgactgcggaagaatggcagaacatgggccacgaatacgatgaagtccgtgacaactgcctgggatgggatattacagattatggtcttggaaactttgataaagtaggcttttcgcttcttacgatccgtaacgggaatcaaaagatgccggagaaatatccaaagccatatgcggagaagcttctgatgctgtatgaggggcagaccgcacccatgcactatcactggaacaagatggaggatattataaaccggggcgggaacgatatctatatcactgtatacaatggagcagaggataaatcaatgctggacacaaatgtgactgtacatacggacggtaagacggaggtggttcctgccgggaccaaggtttgtttaaaaccgggccagagcattaccattactccttatatgtatcatgattttattgttcccgagaccggcggctctgtgttattgggggaggtatccatgtgcaatgatgatgagaatgacaactgtttctatgagccgatcggacgtttcccggaaatagaggaagacgaaaaaccttaccgtctgctttgtacggagtatccgaaggcacagtagccggggcagctgatgcagaaacagagtgaatccgttacctggcatttaggaagagtttcttgcggaaactcttcctaaataatgtcagctgatgttatcgttaagataataattatgacggaacagatggtcatctacctgctcggataaatgcgtcagctctttctggacatctgcaccagttgcaatgtgatagtaagcatatgcaaactgtttgctgaagaacggatacgcaggagtctgcggccttgtaaaggaggaatggcgcagttgtgagaacagtatattgttattgctggaaacagtctgaaaactatccattacctcatgaatttcttttaataccggaataccggtgagcctgctgatcttcaactgattctgcaaactgaacacataccggataaattggcagcactgttccgggtgccgggtctgacgggacatacacagtccccagcttccgtgagggatggcggctttttttccatggggaagaggaatgaggcctatattgtcattttcttttaatgactgaaaatacgcattaggcagagacaggctcatggcaaaattattcggaaaattgtcgctgacatcctcaatatgtgtatagttatatttatgaaacaggtttcccagccaatccattgcagcaatagactccggagaattgatataaccggaagtttttgtcaggtcatcattaaaaagtctgccgttattctgcagaataaaaggaagaccggagtagctgttccattccccggactttggggagagcccccgtccggaatccataagaagcggataggggaaagaggtcttttctttaataagtttacatacggaaagaaattcgtcccagctccaggcatcgtctataccggagggaatgcggattccaagacagtgaaacagttccttgttataaagaatacatagagtggattctgtataaccaaggtgatatagctttccccggaatctgccctgaagaaggataggatccaggaatgagcttaaaaaggcatcatccatgtagtcgtcaaagggaagaagagagttcatatatgcccagtatgctacatccggaccgtccagagagaggatatccggagcatttccgctggtaaagctctggaacagggtatctctaaggggcgctttctggttagacagaaaagtcccttttaccgtaaacccctggttactttcgttaaatgcctcgatcaggggagtccagaactgcttctcactttcttccatgggacacagataaatacttaatacagtctgcagctgggtacggtcagtgacaaagcttccctttccctgctgccggacgatatagccttctgcttccaaagtctttaatgcctgtgtaatcgtgcttttgctgatatttagagtacgcattaattcgttatcggaaggaatggcgtctcccggctggtaacagccgctttctattttatgaatcagattgtttttaatggtgatatattttggtgttctgctattcatacttacattctccctactttttgaaaaagcgttgacaaagctttttctgtatgctaatatcatagcataagttgttcgaataaacaataagtatttcaaaaaactctctgcaagcgcagggagttaaaatataaatcaagttattcgaacaaccgaataagatggaggcggagggtactatgtgcaaagtttttacaagggaagaattgtatgacagaactcccagggtgtataaaagggaggctgcagaggtgagatttctgcttgggggaatcggaacaggcaatttttctgtgaattccaaggggaaattcctggattgggagatttttaactggccatctaagaatacgaaatttcctctttcattttttgcaattcgcacggagaatgaaaagatggatcaaccaattactaaaatattggaatccagactggttcctccttataccagttcacacggatatctgcaggcagagttagtgaatctgccaagaatggaagactcagaaatggtatgtgaatatccatttgcaagagtgaattttaaagattctgaacttccagtccaggtttcaatggaagcgtatacgccgtttattccattgaatacagacgattcaagtataccatgtggaattataaggtataaggtaaagaatactgcagattgcagtacaaaggtgagcctggtggggacattgccaaatgcatcagcatttgagggctatgatgtaattgagaacctgaagctggcagacagcgtaaaaaatgagtataggtcgtttgaagatgtcagtgggctctattatgagccggagcatttgaaagaagatcatttgcggtatggcaatatggctattctgaccagcggagacaatattacatataagacccagtggtttgatggagagtgggtagatggaatccaggatttttgggatgattttacggaagacggacttctggaaaaggaaacacaatcagacagcgtgggatgtgagtttgcgcagtttcataatttcagctttttaaagagaagagaaaagataggatctatcggatcctggcaggagttggcacccggcgaagaaaaagtatttgaatttgtcattacctggttttttcccaatcgggtgaaggcctggattgagtttgatgaggattatgagaagtttcagcggggagaatatggaacggtaaggaactattatgcaatcaagtttaaggatgcatgggatgtgggacaatatgtttaccgaaataaggaacggctggaaaaggaaagccggaacttctctgaggcaatgttccgccgcaccacacttccctattatgtaattgatgcattgacagcaaatattacgaatctaagaagcaatctctgcttccggttagaggatggaacttttggcggatttgagggaatacgggactatattggctgtggttatggcagcgttccccatgtttggaattatgcgcagaccgctgcatttctgtttcctgatttggaggaaaccatgcggaatgtagagttcctgcgggagacagacgagaatgggtgtatgtccaccagaatgttctccgtatttgaccaggagcggtatgccatggttccagcctgtgatggtgaactaggcagcattgtcaggatttatcgggactttaagaatcttggagatgtggaattcttaaaaaatatctggcccaaagcagttgcggcaatggaatatgcccttcgccaatgggatttagatggagattatgtactggacggacaacagaatactacttatgatattgagttctatggtcccaatcccatgacggacagtatttttctggctgcattaaaatgctgtgaagagatggcggaaatactaggtgatgaggaacatcagaaaaaatacggcaaagcatatgaaacaggtgccaagagtgcggatgaactgatgtttgatggggaatattacgtccaggtgcaggaagatatagataagtacaaataccagttcggcaaaggctgtctgtcggatcagcttctgggacagtatctggcatatatggcagggctcggagaaattcttcccaaagagcatgtgaaatctgctatggaatctgtattccgttataattacaagacggatttctaccatacggacagtgtacacagggcctatgccattaatgaggaacacggtatggtagttgcaacctggccgaagggaggaagaccgaagttcccattatcctatgcaggggaagtatggactggtgtggaatatgaggtggcagtaaatcttatctattccggatgtgtggaggaaggccttaccatcgtcaaatctattcgtgaccgttatgacggatataagagaaacccattcagtgaaattgaatccggacatcattactgccgggcaatggcgagctggggcatattaaatgcactgcttggattgaagagtgatatgtaccgcaagacactttctatccgcccttttacagagggggaattatcaagcttctttatttgtgggaaagcgtggggcgtctacagccagaaaatggaagatgggaagttggtaaaaagcattgacgttctttatgggacgttagatgatattaacgtagaagcgtaaggagggtatttacatgaagaaaagaaattggaaaaaacttgttggagcagtttgcgccgcggttatggggacatccatgattggctgcggaaacgctgggagcggaacggagcagaatgaaagtaaatcagatgacgggatcaccataacctttgcagagcatgtggcagatattgagacacaggaaccccatatgatgaaaatcattgacgcatttgaaaaaagtcaccctggaatcaaggttaatattacgggaaaagaggtttctgagcataatacacagatgactcttcttgcaggagaagataaactgcctgatattttctggctggaacaggcgcctgcaaaggagtttgctcagaacggatatctgtatgatctcacagatgcgctgaatgactatggaatcaatgacagcctgctgccggggctggtcaattcctgtaccgtggatggcagggattatggtatgcccagtgaagtaatgatggttggtttcttctacaataaggacctttttgcacaggctggaattgataaggctccggttacttatgaggagtttacagattcggtagacaagctgaacgctgcaggcattacaccgctgacagtcggcgcacaggataattacagtatctgggcgtttgaaactatgctggcaagatatggtttctttgaaaagctggacggacttctggatggaagtatttcctggaataatgaggattttatccactattttgaaaaagtagaggaaatgagagaaaacgatacctttacaaaagatatttccaatatgggatattttgaagcaaaagagcagtttcttggcggtaatgcagcaatgttcaactcaggcgcgtgggatatcggagaatttgagagcagtgatatggcatctaaaattggcttcttttggggacctaccttttctgacagtgagtacaatcaggagattggtatcaaggcttccggcggagtatatgtaatatcagcaaaggctgcaaaggatcctgaggtattagatgcagtcatgcagttctggcagttctattacggcccagagggaacaaaaatcattgcagaagatacctctgcattgccatgcgcaacttataatgggacgattgataataatgagcatcccgtacttggtactatgattgaagcgctgaatgatgactggaaagcagtaacagagccgtttaactcattgtcctccacagttgcatatggtttcttcgatgcaacctttggcgttatgaatggtgtatatacgccggaggaggccgctgattacgtagaaggtctgcagagtgcggaaagataaaaggaaggctgggggcggtatcagaatataccgccctttttggctatgtagaatggaggatgcctatgcattggttgagtacaagaagagcaaaaacagttatggtgcttccgacccttattacttatgctgtttttataatagtgcctgtatttgtggcaatttattatagctttacagattacagcggacttggaaaagctggatttgtagggatacagaattatacccggatgttccacgataccctgtttttgatagcattgagaaatacagtagttgtattgatttgcagcgtaatatttctgttggcaggatcatttcttacggcgctgctgatgaatgtcagctttcgtggaaatgcattttttaagatggtggtatttgcaccgtatgtaattgcaccgattattatcggaattatctggggatatctattgaatcccaactatggactggtaaatagtgtattgcgtaatttgggtttggatgcattagcgattgagtggattggaggtacaaagtggtctcccctggcgctggcaattgtattcacctggcaggttctgggctttcatgcaacgatctttctctccggaatcaagacgattccaggggacatatatgaggcctgctctattgacggggcaaacgcggtccagagattgttttatgtgaccattcctatgttgaaagaaacctttattataaacattgttttgattgtcaccggtgtattcaagatctatgaactggtctatcagatgacaggcgggggtcccgctcatcagtcagaacttttgacctcttatatgtattttaccgtatttagttccagaaggtacggctatggcatggcaattgcggttgcaattctggtactttctattataggttcgttctcttatatcaagatcacgaccagaaagcagaggagtgaagcatgagagagaagagtatttcctggagaggaattatattatatattggacttgcggcattgattctgctgctcttaatgccgattttatgggcaatattgctttcatttaaaacgaataatgagattgtaaacagtccgctctccctgcctcaggtcctgaattttgacaattatcagagagcgctggacacgattgactttggcagtatgtattttaataccctattactggtagtggtgtccacatgcctcagtattgtttttacttttatgagttcctttgcaattgcaagaatgtcatttaagaagagaaaaaattcggaaaacctgtatttgtttctgctgatcggtattgcaatcccaatctatgtattgctgttcccaatttatagaatagattccttaataggaattttaggaaccagactgggcttgattctgccttatgttgcggttaatatttcttttaatacattgctgtttaccggattcttaagagaccttccgggagaactggaggaagcggcaattattgacggatgtaatctttttaaattatgcacaagggtagtgattcccgtgatgaagcctacctttgtaaccattgtgatattcaatgcagtatatatttacaatgaattcccctttgcctcgacctttatacaggacagcagcctgaataccgtatcgttgatggcgtccatgttcaagggacagtattccatggattacagcggaatcattgcggccagtcttatgattatgcttccggaattgatattctatgtgattttgcagaagtatattataggcgggatgactgcaggagcggtaaaaggataggcgcgcccataaaagggcgttctgaaaagaatacagacaagacccagatgtccgcggcgagctggaagcagaagagctttctatacgattacagtatagaaggctctttttttgcttttttccaaagcacaaaccaaagataaacggaagccgaagtgtatatccctttgacaaaaaataaacaaaaaaataatccatgatttgcgatttgtattaacagaaaagctttttctgctcaacgaatctgactgaaaatgggcgtttggtaaattttgagcgaattcataaaaaggcaattataattggagaatataagaaagtaaacaatggaagggggcgatgcagatgctgataaaacagcatatgagtacttactcactccaaaattcatgtacagtcagttggcggttaaatccaaggcaaacttagattcctgattcccgaaatctatgcggctctaagccgcagaggagtaatgcttgcttcccgtccggagaaggtatttagaataaaatcaggctggaataatgggcattgacagcatcctgcagcgcttcactttgacggttcttaagggctatatatatcttttgatgctggtgcagcaaacgtccgaaaagcctgtcatcctcttcgcagcagatgctcataaaaagaaacaggttttggtagcgggtataggtatcctttaaaaaagtgttttgagaagcatcgacgattgtctgatggaatttcaggtcgcaatggcagaatcttataaagtttttctcattaaatgattttgtcatacttacatagcactcatgtagaagttcgattctgtcctttgagatatcatagagcgcctgattggcggcaagcaaatctaactgccgtttaaaggaatgaatattggcagcaaaacggatgccgggtttcgtaacataaaaggcaccagtctcatcatgggccagataaccgtgactttccatcttttccaacgccagttttaccgggccgcggcttaaattgaaatccgtactgagcttattctgactgagatgatcgccgcattttaatttcatagtaagtatttcagagataagtactttacagattaaatcttgattagatataaaaggattttccttgcttatggattttataagttccgatcttgtcatgatttaaatatcccccctctgtttataggaatttttgaaataaataccctacactgccatgactttttatctatatatcctatactatagcaatttttgcttatattagcaatcaaaaaaagttcaaaatgaaacaaaataaccaaaaaaaattttaaggaggtaaacattatgaaagttttaatgtatggagctgagattgcaaaggttttctttggcgatttgctggctatccttgatgaaaagggtgttggatatgatcttgttgagcccaacggccctgaggccctagctgaggacagcaaagaccatgaggccattatcacgttttttccattggatgaaaaattggttaacgcacttgccccatccgtgaaagggattgtggttacatccatcggcttcgataccattgatgtggccgcagcaaatcagagaggtatcttggtgtgcaacattcctgactactgcaccgaggaggttgccctccatacggtaactctgatacttgcaggtctgagaaatctctgccagtatgaccgctatgtccgcgccggcaaatgggataacaggggcatggtattagggagaccccgtcaccgtctgtccaccctgaccatgggttttatgggctttggacggatcggccagaaagttgcggggatgatgacaggcttcggcgtaaaaattatcgcatacgatccttacgtgccggatacagtatttgcttctatgaacgtggaacgggccggggctcccgacgaggtttatgagaaatcagatatactctctgtatgtatgctgttaaatgatgaaacctaccatcttatcaacagggacagcattgccaagatgaaagatggtgtgatcatcgtgaataccgcccggggagcgctgttcgatttggagagtgttacagaggggctgcagtccggtaaaattggggcagccggcattgatgtttgggagaacgagcctgttgccgcagatcatcccattttaaaagacgataatgcgacgctgtctacccactgtgcatatttttccattgaatcaggcgaggatctgcgcagaaaaactcttttgacggcagtaaatgtctgcaatggtgaggtgccgtataactgtgtcaacaaaaaggcccttgggctagtttaaagataggaaggggatttcttctatggcaatgattaaagtagatgagaatagatgtaaaggctgcaagctttgtgttgtcacctgcccgcgcaaaatcctggagatgagtaaggagctcaatgcaaacggcgacatgtactgtgtgcaggcggagccggacaaatgtattggatgtgctttctgcgggatgatttgtccggacggggcaatcgaggtttataagtaaggagggaaaatatgacaaaagcatttatgaagggcaacgaagccgttgccgaagctgtaatcagaggcggtgttgatttattcgccggttatccaatcacgccttccagtgagatgttagagtatgcttcagatcacatgtgtgatatagacgctgaatttatccaggtggaaagtgagctggccgcatccaccatgctgtcagccgcaggcttaatcggcagacgtgcctttacaaccacatcaggaccgggactggccctgatgacggaaaatctcagcaacatgatccttggccgtaccaccgctttgttcgtagtggtgcagcgcgcagccaataatattacgccggaacaggcagattacaattacgcaaccaaagggctggggcacaatggtcagcggggatacgccatagcgccctccacactgcaggaggcggtggacctggcgtataccgcacttgataaaggccaggagcttgagtgcccggtgcttctgatgatggacggtatgctgggacagatggaagaacccgtagagttccctccctataagtcaagcaagatatccaccaaactgattccgcccacaggctgtaagggacgtgccaaagaggacagcagatccatgccgcgtccgttatctatgaatgagacgttagaggatgccttggaacgacaccgcaacgatctctatctggatcagctgaaatggcttgatgaggaagttatgtatgaggaatacatgatggaagatgccgagtatgtgattgtttcctacggaagctccgcaagaatctgccgggataccattaagatgctccgtgcaaagggatatcctgtggggatgttccgtcccattaccatctgccccttcccggaaaaacagattgccggattcaaagacaggggaatcaagggggtcctgactgtggaaatggctatgcctcctatgcttcactatgatgtgcgccttcacctggatcaaaacattccctgcagattttataaccgctgcggcggaaatacggtggatgaaaatgaagcagctgaggctatggaaacgctgattaaggaggtgcagtaataatggaatgtgtatataaaagaccggaatctcttacaccctacccaatgatgttctgcccgggctgccaccatgctattttaataaagctggtagcagaggttcttgatgaaatgaaccttagggaacgggctgttttggcagctcctattggatgcggcggtatgacggtgccttccgccaactttgacactatatttactctccatggccgtgtaccctctgcgggctctgccattaagaggctaaatcccgagagtcttatcatctgctaccagggcgacggggatgcaggggcaatcggtacggccgagacggtacatacagcccgccggggggaggctgtgactgtaatctttgtcaataacagtgtgttcggcatgaccggcgggcaggcagcgcctactacgcctgttgggacatggacgattacctccaaaaagggtaaccgcgaggtgcccctgaaacttccggagatgctggcaaccctggatgagccggattatgtagcccgctgtgcggtgaataatccaaagcacattatccagtgcaaaaaggccatcaagcacgcgttcgagcggcagctggaaggcaagtattcctttattgaggtggtaagcgcctgtgttaccaccatgggtataaaggcggagaaatccccggaatttattgataaggttatcaaaacagacttcccgctgggtgaattcaagcgggatggaaaacgactgtaaggaggtgcacacatggaaaaatgcatgtattttgcgggagtcggcggacaggggctccaggtacttggaaaaaccattgccgaagttgcaaacgagaaggggttttacgtaacctattctcccaaatatggagctgcaaaacggggaggtcttacctcctgctttatcaccgtgagtgatgaacctatcggcaacccccggaagaagaaacaggatatccttctggtaatggaacccagggcatatcagcagttccgccatgacgtaaagaccggaggagtcatggttgtcaacagcacgcttatacctgaaacagaagagccggatgaaggggtaaagatggtgaatacccccttgcacggtgtgtgtgcaaagcttgggaatacgaaggtgattagttccgtggcactgggtgctattgtagaactgctgacggatatcttcccggataaagaagtgttcaaggaatttatgctgcggcagctttccaataagccggagcttctggaacttaacaaaaaggcattcgaggccggaaatgccgctatacagaaaaacttagcataatatgttaacttaaccatacgcaaggaggacatttatgaatctcagtcgaatcgaaagccctgtattccgcgagaaagtaattactgcggagcaggcggcaagctacattaaagacggtatgaccgtatctgttccgcattttatatgctatgacagtcctgtcagcacggcgcgtgccctgctgggacgccggaataccggtgagaaaattgaagtcaaattgatctctgccgcttcctgtaccccggtaatagacgaggattggacgaatgcgggtatgatcaagagctttatgccttatacacaggcacattccagtgtacggaaaagtgccaacactgccgagggcggtcttaactttatggactatcgtctcagcctcattcctgaatatatcagaagcggttatctgggagatattgacgttgctctggtttccgttgcgggaattacagaggacggaaagctgaaaccatccgtatgtgcgggatatacgcagacagtgctcaactgtgccaaaaaggtaattttggagattaatcttcagtcttccgagggtatgtaccggctgcacgatgtctatgaacccgacgctcgtccggggcgcaagccgatccctatcaccaaggccacagatgtaattggctcccatttctatacctgtgacccggataaggttttaggggttgtaattacagatgaacccctgttcctcagtcctatgtggtatcctctgactgctgatgcggcccctccggaggttaaacagattgcgaaaaacttcgttaatttccttcagatagaggttgcggagggcaggatgtccgagaagcttccccccattcagaccggaggaggaatggttgccggtacggttctgcgtgaaatgggcaagcattttaaaggtatggaaatgtatacggaggcagttttggaggacgccatggatatggtgcgcgaaggcagcattgactttatttccactgcagggtttggctgtgccggtgatacaaccgaccatattctgaaacatcctgaggagtatgaagggaagctgatggtacgcccggttgagatttccaataatcccgaagtcatccgcagacttggtcttatcactatgaataatatcgtagaagcagatatttacggaaacatcaactccagccatgtaaatggcaccagtgtcatcagcggtatcggcggcgcacttgacttcgcgcagaatgccggactgccctgttatttcacactgtctactgccaaaaaaggtgcgctgtcctgcatcgtgccttcctgctcacatatagatatcacagaacatgagccatgtattattgtcacagaatacggtgtggcggacctccgcaataaatcacccaagcagagagtggcggagatggtgcgcatcgcacatccagattaccgcccaatgctgcaggaatattatgatcgcgcactggaatcctgcggtccggacaaggcacatacgcctgtcctgctggaggaacttggagcctggcacatcagggcccgcgacaacggcagcatgcttcagaaggattgaccccactgaccgttttcgtttctttggcagagcttaacgtatacctccatttaagtttttgagtttcgcaatataagctgggtgaaagcggtcttttagtttttctgcccccaaccgccctgccgcactcctggtacaatgcctatgtaccggggacatgaaagattggggtaatcagcggcagacggcggtgctattattgacatgtctattccaaaattaatcatctaaagagtcttttatactgaaacagtgtaggggactcttattcctaattgctgggggagctataaacctgtgggaacttattcataaatgtgtcaaacttattttaaaactcaaactatataattacaaaaataaaaagatttgctaatgacttataaaccttgttgcaatccctttaaataagacaaaattctgcttaattattaacaaaatgccaatatatggtgttacaatatgcctatctcagggagctatttccggagaaataggatgaattactaaaggagaaggggatatgaggagaaaacaattattggcattgggatgtgcattggcactgtgtatttccgggttggtacccggtaccggtggaaggatagttaacgcttccgcagccgcaagtacggaaagcaaagagggggaaaccggtaaggagaaagtgaattcagatacagcggctgaaccgtcgggtgaggataaaaaagagcagcccgaagagggacagacgcaggacaaaaaagaggatacaaaagatacggataaagagaagcaggataccaatcaatcagagagttcagagactaaaggtagcgataaaaaagcaggcagtgaaggtacagattccgagacaagaaaagcagatgcaaaaaatgagcaaaagagttcctctgaagaagagattatagaggaaagtacagcggacagcgatgcagtaaccttatttaaacaggtaaatggcgatggtaaagagaaaacggagaccaaggaagactatttggatgtgagcctggggcatgataaattagaacttgagataaataaagagtttgaactgactctcaaggtttcaggagggaaaccaccctataaaattgatggctattatgggcctgactggctgaaagtcgatggtattacgctgtctggcaaaccaacgaaggccggggtatatcttttttcctatacggtcagcgatgccaacgggaaaatttcctggggattagatgcccagatcgttgtcgggggaggggacacaagcatgcctaaagtaaaacttgttacccaagagaatgataccgttgtggtattgggtgaggatttcagatttcctattgaaatttcaggaggaactgcgccatatactataaaactgcggggagctccggagtgggtaaaattggagaatggggcgttagtcggaaaggccacggagctttcggaggggtatggttttggaatcagtgtggtagatgccaacggcacagagagtgagatgctgccttgtgccatcaaggttgtcaaagaaaagcaagaccgggataaggacaaagaaaaagacaaaaaggacgaaaaaaccattgaagcatctaaggataaaaaggaaagtaccaaagataataaagaatcctccaacaccactaatgcagtaaaaactggggatacagctcccattgctatcctggttgttgttcttattgccgcggggatcggcattgtgatatttacgaagaagaagaaaaaggataacgatcaataggcaaatcgaaaggcagagccgccggctctgtctttttgttggcagtactgggggtggtaaacctatccatgcgtgatacctggcggatattgcaggttatctcttcgtatttacatcttagcagtctctctattgcaaaagcagaggaaagaaaatatagtacagaaaaggcaaacaagaagggagcccgcgggatgaaagaaatgatgaaagtagaacacctgaaaaaatattttaaggaggcaaaggcagtggatgatatcagctttgccgtagaaaagggagagctgttcggtttcctgggggtgaatggggccgggaaatctaccacgatccgtatgctctgtaccctgtctgcccctacggagggtcgggtgactgtggagggactggaacttgggagggacaatgaagagatcaaacgccgcattggtgttgtatatcagaataattgcctggacgctcttcttacagtcaaagaaaacctatggatacggggcgctttgtacgagaaggacaaaagaaaactgcgcaaaagcctggacactgtctgcgaggctctggaattgggtgatgtgctgaagcagccctttggaaagctctccgggggacagcagcgccggtgcgagcttgcccgggcgcttctccatacccctgatattttgtttctggatgaaccgaccaccggcctggatccatccgcaagaaaaagtgtctggagcatcattcacagtctgcagaaggagatgaacatgacagttttcttaaccactcattatatggaggaggcggcaaaagcagatcacattgcaataatagatcggggacatctgatacagtatggcacacctttttttctgaagaaaaagttcgcaaaagacaagctgcggctgttccccagggaagatgccgtacaaaaaattctggaggagctggataaactgcagatccggtatcggcagaaggaggggctgatcacggtccctcttgactctacgatgtctgcccttcctattgtagagaagtatcagggaatgcttttggggtttgaagtagtgcagggaaccatggatgatgtttttttacaggcagcaggggaggagacagtctatgcgtaaatatctgagtcttacaaagaggaattgtctggtatttttgagggacaggtcagcggtattcttctcactgttgtcaatgatgattgttttaatgctcacgggggtgtttctggggaatatgaatgtggagaatataacagaactccttgcccaatatggagcagcccgaaactctgccctggacagggagaatgccctccatctggttcagtactggacgcttgccggaattatgatagtaaatgcggttacagtcactttaacggcagtgggagttatggttcacgatgcgtcggaaaaccgcctggacagcttttacactgccccggcaggaagaaatatgctggctctgtcatacgtgacatctgctgcagtcatcggcacattcttctgtctgctgacgctgggcgcagcacttgcctatattcggataaccgggggctcccttctgtcttgcggcacactgggtcaggttatggtgtatattttcttaaatgtctgtatctatgcggtaattatgttcctggcagctctgtttgttaagagcaccagcgcctggtcagggattgctaccattgcaggcacactggtgggattcctgggggcagtctatattcccatgggttctttgccggaaggagtgaccaggattctccggtatacacctgtccttcacggggcatcgctgatgcggggagtcttttgcagggaggcattgagcacagcctttgcagggatacccgctgctgtaacggaacaatataaagaatatatgggtatcaccataaaaatgccgggaggagaggccgccgtaagtttccagatcctgtttctgtgcatttgtggtatagtagcattagccgcagcggcgtggctgataaggcggagaaaaagcagtgacaggtgactctgtgcagcatctggatggaaaggaactgcagaatgaaaattacaatcctagataccggtcccggggaagaggaagaaattatactgaaatgtcacagaatagatgacagtcttatgaaccttttgaatcattttaagcagggggataccaagctgaatgtctaccgtgacggtgagatttaccggatagcacctggagagatttattattttgagtctgtagaccagaaggtattcgcatactgcaggactcaggtttatgagacaaagagtaagctgtatgagctggagagagaactgcctcagcatgattttctgcgggcaactaaatcctcgatcttgaacctgaacaagataaaaagcctgacaccggcattcggcgggcgttttgaagcggtgctgaacaatggggaaaaggtgattatatccaggcagtatgtggggagcttaaaagagaagctgggcttataggaggacagacagaatgagtcatataataaaacgaatacagaacatgctggctatgttttttcggattaccacaggaattgtgttagtaactgctgtttatattggtgtcttctggggatccggcagcgagatagaagtaaatattctgtggcagattcttatagtatcagccctctgtacactggggagccttttgattccctgcgaggcagagaaggaggtatccaagagaagtatgtttgtgcggatgattctttattttatctatgtgaatgcggttgttctgggctgcggtctgtggttcgcatggtttttcccttccagcccccgtatgctggctggtatggaggtatgcatcattgcggtatttgctgctgtgacagcggtaagttatttttccgcttacaggatggcagagcagatgaaccagaaactgcgggagagaaagggagaataatacggagtttgctatagggttaacctatagcaaaacatagagtatatgtattaacacttttcctattaatattgtatgatatatccatcgagagaaaacaaagagaaagtttccagatggaggtatatgatatgagtaaaaaaactagagcagacagatcgttcaaatttgagaccttacagcttcacgtaggccaggaacaggcggatccggcgacggatgccagggcggtgcccatttatcagacgtcgtcctttgtgttcaggaacagtgagcatgcggcggcaagattcggtctttccgatgcgggcaatatctatggtagattaacaaacccgacagaggaagtattcggaaaaagaattgcggctctggagggaggcacagcggctttggcggtggcgtcgggagcagcggcaattgcctatgcaatagagaatattgcccaggcaggggatcatgtggtggctgcaaaaaatatttacgggggaacctataattttcttgcccataccattaagcagtacggtgtttccaccacctttgtggatattttcaacgacaccgaggtggaggcggccattcaggacaatacaaaactggtatttattgaaactttaggcaaccccaattccgatgtggttgatatagaaagaatcgctgaaattgcccacgctcacaggattcctcttattgcagacaatacatttgccactccgtatctggtgcggcctattgcgtacggggcagatattgtagtacactcagccacgaaatttatcggaggacacggcaccaccatcgggggtgtaattgtcgacagcggaaagtttgactgggaggcttccggaaagttcccttctctggtggaaccgaatccgagttatcacggaatcagcttcacaaaagcagtgggagcggctgcctatgtaacgaagatccgggcaattcttcttcgggataccggcgcgacactttctcccttccacgccttccttttcctccagggtctggaaaccttatccctgcgggtggagcgccatgtggaaaatgcactgaaggttgtagactatctgagccaacatccccaggtagaggcggtgcaccacccttcggtgacagaagatccaaaacagaagaaattatatgcaaaatacttcccaaacgggggcgggtccattttcacctttgagattaaaggggatgatacaagggcaaaggaatttatcgaccagctggaattgttctccctcctggcaaatgtggcggatgtgaaatcattggtgattcatccggcttctaccacacattcccagatgtcggcagaagagcttgagaaatccgggattaagcccaacaccatacggctttccatagggacggagaatatagatgatattttggaagatctggaggaagccttccgggcgattggggaataagtggttctgacaggaaaagactgtacgccgcttaggaatgatggtaaagtattgctgtaaccaatagaaaagggaagaaatctcttttgggaggcacattatgactttacagcagttaaaatatattatagctgtggcggacgcaggttctctgaataaggcggcaaatgcgctctttatctctcagcccagtctgtctgcggcagtaaaggaattagaagaggaaatcggaatcacactttttcacagaagcaaccggggaattgtagtaaccgcagagggaaatgaattccttggctatgccaggcagatgatggaacaataccgccttatagatgaacgctttatagagaaaaagcaggggaaaaagaaattttcagtctccatgcagcactactcatttgccgtcaaggcttttgtggaacttgtaaggcagtttgggatggacgaatatgaatttgcggtccatgagacaaaaacttatgaagttatagaaaatgtccggaatttttacagcgagataggagttatctaccaaaatccctttaacgaaaaggtcctgaataaaatgctgcgtgagagggagctggaatttgtccctctctttgactgccgggtgtatgtatatctctggaagggcaatcctctggcagccaaagaaaagatttccatgaaagatctggaggactatccctgcctggcttttgaacagggagaaaacaattccttttatctggcagaggaggttctgagtacttacgagtacaagcgcctgataaaggcagatgacagggcgacgtttctgaatctgatgatggagctgaatgcgtatacgctctgttccggaattatctgtgcggagctgaatggaggggattatacggcagtgcccctggacagagaggagactatgaccattgggtacataaagcgaaaggggattcctttgagcaggatggggaggctgtatgttgaggagctggggaagtatggaatccccctcccgccgcaggattttactcatccggttatgggaaggggaagcggttttagtgctgggggttagactagtttgtagttaatatggttttggctgaaaaggtctgtcatggttttgctgcattctttatctgtgatgaggcggtagatgtcttttgcgctgcagacggagagaatggtggttttattcattttggagctgtctgctaacaggatggatttatcgcaggattttagtatctggcggcgcagcatgacttcttcgtcaaaatagtctgtcacctcaagctttgcgttcagcccggcacagctgatgaaggctttgtccgcatgaaaatcctttaacagttcaatggtgtggtggccgtagctcatataatcatccttgcgtatccagcctcccagaaagaagactttttcaaaattactgtcttttagtatctctaccacgcggaaggacatggtgataatagtcagtgtctgtaaaagttcgggccggccggtaagaacttttgccagttcctgcatggtggtgccgctttctattatgacagaatcgcccggccttatcatgctgcaggcagcttccgcgatggccttttttttctccaaattctctgcatatcttatatcatatgatttttcactgcccgtactcacctttggggctaccccgccgtggattcttataatcaaatcctgttcatccaggtactcgatatctttccggactgtctcagcagaaacggagaagaactccgccagttcgtttatggttgtcacaggcgaacgctggatcacatctaacattttttctcttctcacatcaattttattactagactgcatgacttctccttatattccagtacgttaaaaatatccgggtatacccctaaaatagacacaggggcgctttttactgtatgcccttggcgggcatgggacattttccgtatgataaagtatatcatagaaagcggcctgcaacaatgtcaaacatgcatgaatacagctatatatcggtttcctcccggactgccaggaagtcattggaggggccggttgttttgcggaacagaagctcgtcactcccggcagccacataatcccgaaaggttcctatatgttcatagccatgccgtttatagaaacgtacggcgccctcgttaaaagaagccgcaaaaacaaagacattgggatgtttttttaagataagagtttccgcaaaggataagatcttgcttcctatccccagtccctgaaattggggatcaacgcagaaggagcggataaatcctttcaggttgccgtgcatttctaaaaggatgcagccggcaatctcatccccgcagtaagcgacatatagttcgccggaggagtcccgtacctttcccattgtatagtcgtaggtccggccgaggctgacccatggttcattctgacttaaaagagccgcgcttttagcaaattcctgatccgtagcagccatacggatatacatccgtttgttacacatttttataccttctttctttgttatataaataatacagctatcttgtaaaaaacataggagatccactgggagccaatggaaagacaggtaaccatactggcgccttccggaaattcaaagcctacactttgccctaacgaggtcataacaggagcataatccgaagaaatcaacaggataacggccataaacagggtcccgatgagccagccccggaatacattcccgttgcagggaacaacggcccatacaataaagaaagcgagtccgcttaattcagccagggggagggttacatttccggggataataactgctaaaaggagagtggtagggatgagcagcagcgaggtggcaatgatggatggatgtcccactaccacggcagcgtccagaccaatatacaaagaccttcctttaaaccgtttctgcatgaactgggaagccgccgcggatatgggcatcagtccttccatgagaactccaatcattttgggaagcagatacatggcggcactggttaccatagctgtattcataactgtagaggcatctgtccgggcgataatagccagaagtgcgcctataatgaggcctagaacacagggttcccccagcaccccaagttttttctgggttttttcaggggtccagtcaattttattaagaactggtatcttatctatcagtttattcagagggataccaatcagtgcccatccggtggactcaatgtgaggaatagagataccaggtataccaaaaaatttttccacatagggctgcgaataatcggcgattttaaagatgacagccatggagatgcaggcggtaaccacggcgaggatcatattgccgctgatcagatacagggctcctccgataaacagaggctgccagtagttccagatatctacatccagggtcttagtaaagcctgcgataatcaaaagtatgttcatcacaaatacggacaccaaaatcacaggaaccacagctccgcttgaccaggcaatgctggcagctatgggccagccaacatctacagccgtcagtttgaaaccataaacatcaactaattggttgataactaccataaggttatccgcaaggagtgagattacgaggttaattccgataaagcctattcctaccgtgattcccgctttaaatgctttccccggtttaagaccaaagataagtcccaaaataagaatgatgacaggcatgaagactgaggaaccggcgtccattataaaattaatgacttgaataaacatatgtataccctcctcctattttagttttgaaacaatctcctccaataccgtgtcacagccgattccggtaatgagggaaattgcatttacaacttctacggggtaatcgccccccagataagtggtagagacaatcaaatcaattccatccagattagagtcaatggaagtgggggtacagcgcctggtctgtacattcagtcctgctgcagtacaggcctcaatgacccggttctctgccactgccgaagtgatgccgcctgttccacacacaaacaatacatgtttcataagataatcctcctttaaaatttgtaaaaaaccaagtatttatttggatattatcattaaaattggataaagtcaataatttattgtaaaaacaaagaaaaataattggcgtgctttagtcaatatgacattatgaaatgagaaaataagatggaaatggtataatgtgtattaaaagttccctaacgatagggaaactgtttggtattttaaatataaaatgcggatgatatagtgtagatgtaaacaagatgcacatctgcaaggggacaacctaaggagagacgcgtatggagaatctgaataagaggcagttggagtttgtcagactgctgctggaggaaaaagagtacaggtctattcagtattttgcacaaaaactggaagtatctgataagacgctgcaggaggatctgaagaccattcggggggaactgaagctgtacggagcgggaattcttgcaaaaaccggaaaggggattcttgcggacgaagggatcaggcataacatggatctgctcaatcatctgcatgcagggaaccagccccggaagtggaactcgtcagagcgccggaataacatactgaaaaatctcctgcttcattccggaactgccacctctgtacaaaagctctctgattcctactatgtaggaaaagcgagtatcgtaaatgatctcaagtatgtagaggagtggattgcaccgtatcatttatccctggtgaagaacaaaaaaggcacacagattgccggcagggaaaaggacatccgggaggccatcactgcagtgatccatctggacgaggtaacactgcagaatcttctggagatctttcagccggaagaaattgcatttgtggaggctcttttggaagacctgaaactggataccagtgacatttattataaaaacctgctcacacacattcttatctgcatccagagagtcagaagcggaagaaaggtgcgtacagcccagagagaaaccgtattcagtgcaaaggcggcaaggcaataccagagggcagagaatatttctgcaaagatcaaggaacgctacggtattaacattggggaggatgaaaccttctacatataccagtatatcagttccctgggcacagtggatgagacacctgggtgggtcggggaatcggacagcaaaagtgatgaggttgcggctgtgctgacagaatatatgacagatattctggatatggaggttcgcaatgaggacatgcttctacagggtcttatgatgcatatcagacctctgctgaaccgcctggagtacaacataaagattgctaatccgctgttggaggagatgcagatgagttacccgcagatggtgggcatctgccagattgtatgcggcatgatctgtgagagatatgggctgaaggaaatcagcctggatgagattgcgaatattgcgacttattatcagacacttatggtgaagcagacttctctggtgaatgttctggtggtatgccacagcggttacggcacctcacagctgctgagcgcaaggctgcagcaggaattcccaaactttaacatcctggacgtgattccctccagaaagcttagctcttttgatttaaaacaggcggatctggtaatctccacagtccctgtggatgctgcggcagtcccctatctggtagtgtcctcttttttgaccaatcgggatatcagcgctataagaaataatgtgtatctcctggaacagagagtaaagattaattacggattactggaaagtctgcttccgggaggacacataacctttggaaactggaacggcgccagagaaagagggcgaaagatatgcgaagcttaccttctgccccagtgcctggcggtggtctggaagggacgtaaggataagaccgaagtatttttaaccattgacagggacaacaagatgctgagactggacctgctgcccggaaaggcggaggagcaaaaagaactgttccgggagctttaccgcctttctttagaggaagttaatctacggacacttatacagtgcaggtcacaggaggaagttcaaaaatatctcaggcagggggtgtgcaaaaaatgaaggatcagtcaattcttccggaagagaatataatccttgaaagcggctgcctgtcgaaagaggatgtgattgcctgtgctgtgggacttgttctgagaaattgcagcgaaatggagaaagagaagctggaacaggaaatatgggaacgggagcgactggcttatacagggattggcagccatattgccctggtccatgcagaatcagttactgtccattgtccggtgaccgcgtgtatcaggcttaaagaatatgtggactgggccccggggaaagcctatcctcctcagcataggatggtgaaacttgtttttgtatttgcagtaccaaaagaagaatgcccggagactgaaattttaaaggatatggtacgcaggctggggaaaaaggaaaccgtggaaaggctaatgcatgcaaaacaaagccgggagattatgggaatatttcagtagaggaggataattatggtaagagaaaaggtaacaataatttcaaaggaaggtctgcatgcacgccctgcggacaccctcattaaacttgcgaatcagtttgtctcaaagatagagattgtgtgtggggaggataaaacaattaatgcaaagtctattctgcatgtgctgggagcaggcattgactgtggggcagaggttgaagtggtctgcaacggtgaggatgagcaggaggccagtaaaacaattgtccaggcaataaaagacggtctggatgagtaaagaggattggggtgaatctatgcagggaacaggagtatctaagggactgtgcctggccaaggtaattgtattaaaggaaagcccgattccactggacggcacatggaaaggatatgaagaggaaaaaagactatttctaagtgcggcaaaggatatctatgaaaaaacaagaacgctggccgaaaaaaccagacagtccattgggaaggaagaggctgctatcttcgaggctcactgctccatcctcagggatgaagaactgattcgtcccatcgtggaggagatgcaaaagggaaaaacagcagtcagagcagtcgaagaggttatagaagggcatgttcgtacctttcagggaatggaaaatgaatatatgcggcagcgtgctggtgaccttctggatcttaaggtacagctgcagaggtgtattttaggtatttcaatgccggatctgagtgaactgaaagaggatgtggtcattatttccagggatattcccccttcggttaccggaagtatggatttggaccatgtagccggtatggtaatggaaggagggggaaggacctcccacacgtcgatacttgccagaactttggaaattccggctgtggtaggagtcaaagggattttagattatgccaagaccggggttctcgcggcagtggacggggagctggggaaagtatatctcaacccctccaaagagacttgccgggagttccgggataagattgcccgggagaaagagagaaatgaggaaaggcagaggctggtcaaactgccgtgccggaccgaagacgggcaggagataacactgtatggaaatatcgggacacctggggagacggaaagggctgtgcgctgcggtgcaaaggggattgggcttttgcggtctgagttcctgtatctctcaaggaacaggattccccaggaagaagaacagtaccaggcatacgccggtgtactggaagctatgggggatgctccggttatcatccgtacgctggacatagggggggataaggaagtgcctgccctgggactggaaaaggaggaaaatccatttctggggcttcgggccatccgcctgtgcagggcggagcaggagttatttaagacccagataagggcactgctccgtgcttcggaaaaaggaaatcttcacattatgtttcccatgatttcttctctggaagaattgaggtgggccaaagaaaccgttggacagtgccgggaacagctgatcagagaaggcgttgcagtaaaagataagattcctatggggattatggttgaaattccctcaacagccgttatggctgaggcctttgcagaggaatgcgatttcttctccatcggtacaaacgacctgatccagtacactctggcagtggacaggggaaatgacagggtttcccagctgtattctttttaccacccctcggttctccggttaatccggcatgccattgagggagctcatgaaaaagggattttgtgtggaatgtgcggggaggctgccggggataaaaagatgattcctcttctgattggtctgggtctggatgagttcagcatgtctccaggttcgctgctggatgccaggaaattaatccgaaggctcgacagcagtgagtgcaaagcgctggcagggcagatcacagggctgaaaacggcggcagagattgagcagcttctggacggatacctgaagaagaaagaggaggagcatgaacaagaactataaatctatttttttgtcagatattgacgggaccctgtcggatcacaatttttacatccatccgaaggtgatagccgcggctgcagattatatggattccgggggtatcctggtattaagcacgggacgggcgcctgttgccacagagcaggtggcaaggctcatgaatattacacatccctgcatcgtatacagcggagccggaatctatgattttatccagggcaaactgttgtggagcagccctatgggggaagaagttctggcggcagtgcagtatgtgctggagcagtatacggatgtaagtgtccaggtctttacagatgatgggatctatctgctgcaaagcaatgacatcctggaccagaaggcagtgagggcagagcgggggatccgtatcccggaggtatcccttgtaaaaggcaggatattaaagatactgctgacaggagccgatgcggtggctttagagacatgcggaacatggcccgtctggaaggggacaacttatagatttgccagccggcattttgtggaaattgtctcggatcatacggacaaaagcgtagctatggcagagcttttgcggttgtatgacatgaatccggggcagacatttgcagcgggggatgcaatgaccgattatactatgctggcctgcagcaggtattcctttgtaccggccaatgccccggaaaaactgaaaaaaaccggaagcaggatcattgaggtacccgagcagggaggcatggcagcagcgtttcagctggcgcaggaatataacgaaaaaggagagatattatgggaagaacagtaaaattaatggtggcctgtggatcaggtatagcaacatcaacgcatgcagcgtcgatggtacaggaatatatggaggaacggcacattcccgtatccattatgacatgcagcgtacaggatcttgcaaaccggttaagcggatgtgatgtgattctgagtacagctcaggtttcctttgaatccgggctgcctgtgtttaatggtgtgcccctgctgacaggagtgggggatgatgagctgctggaagagctggcagccaagattctggaaatctcgaatacagctgtttaaaaggaaaaggaaaggagaaagcgtttatggttgatgtgattactaaagtaacaagtgcgctgacaagtctgggggcatcggtgttaatacccattttcatctttattatgtgtatggtgttcggcgcaaagttcaaaaaatctttgatggcagggcttacctttggtgccgcttatatagggctgaatctgatcataggcctgctcatctctactgtgagtcctatggtagatattatggtggagaactggggaattaaaaatgatattttagatgtgggctgggcggttggatctgccattgcatacagcaccacctgcggagctttgattatcctggtttcccttggagttaatattttaatgctgtcaactagactcacgaagacgttaaatgtggatatctggaatttctggaatcacgcgtttaccgcatccgtagtgtatatcatttctggaaatttaattgtcggattgattgcgggcggaattcatgcggcgttctgtctggtgatggcagaccggacggcaaaaagagtccaggcattttacaatgtgccgggcgtgtctatccctcacgggtgggcagtaaccagtgtaccaattattgccggagtgaactggctgctggaccgtatacccggagttaagaatatcaactgggacgaaaaacatattcaggaaaaatggggaatttttggaagtcctcttgtactgggaacggttctggggctgattctggggtgcctggccggatattggagtgatatccctctgctgctaagctctgccatatccattggcgcggttatgatgattatacctaaatttatagccttgtttatggagtctctgaccgtagtttcagatgcggctaagaagtttatgaaaaagcatttcggagatcgggagttttatgtaggcttggattctgccatccttatcgggcacccaactacagtagccgcgggaataatcctgattccggttgttctggtactggcagtgatccttccgggcaaccgggtgcttcccttcggcgatctggcatccctggcttactttgtagctttggttccctgtctcagcaagggaaatcttttccgctctctgatctgcgggattgtaatcatgagcgtggtaatgcttatctgtacaagctttggttcctcaatgaccaccatggcagtacaggcgggatataccattcctgacggggcagttaacatcaccgcactttcggcaggtaactggctgacttggatcctgtcaaaaatcgcagctattttttaaaatggcgggcaaggctttgatataaaaaggaggaaaccatgaaagcagcagtatattacaccaatgcagatgtccgggtagaggaaatgcctaaaccgacagcaggggagggagaaattgttgtaaagaccaatacctgcggagtttgcgttgcagataccatggaatggtataacaaaccaaaagcccctgttgtcctgggacatgaagcagtgggagtgattgaagaaactggagaaaatgtggaggaatttcaggtgggggaccgggtgtttgtgcatcatcatgttgcctgcatgaattgtgaggagtgccggaaaggaaagtatactctctgccgtcagtttaaagcaacgaactataaaccgggcggatttgccgagtatttcaaagccggacggagccatgttaagacagacacgttaaagctgcctgacagtatgagctttgaggaggcagctctgatcgaacccctggcatgtgcgcttcacgggattgagcgacttaatgtacagccctctgaccggattgcagttattggtgcgggaactatagggttgatgctgattgagtccctgaaagcctacggggtaaccgacattgtggcctatgagatgattccgtggaggcagaaaatggcggagaaaaagggagcaagggcggtccgtggagcggatgcggatctggacaaagagctggagtgcctgaaagaaacatttggatggaatcagtttgacaaagtgtgtgtcatggcaaaagatattaaggccatggagatgggtctgaagctcacaggaaagggaggaaaattattattgttcgctaccccggccccggaagaatatgtaaagttttacgtaagccaggcgttttttaaagagctggaggtgctgcttacttattccgcaaatcacaacaacacccgtgaggcattgcggctcatagacagtaaaaaagtggatgcaaaatcctatattacccataggtatgctctgaatgaattggataaggcgattgcccagaccataggacggggagaatgcctgaaatgtattgttaaagttgaagaatcggaagaaggcgaagtatgagttatcagataactatggaaaataaggttgctgtagtaaccggagcagctcagggaattggagccgcaatagctgcaaagtatgctgaagcgggagcgcaggttgtaattctggatgtctgcccggaatcctgtgcggcagagcttctgcagggactctctaagtatggaaaaaaggcggcttactatctctgtgatgtctcagacagcccggcagttgcagctgtatttgcagatgtggttcacagatttgggcgtatcgatattctggtaaacaatgcaggtgtggtggctgattgggacaaaagctacgccattaacgcaaaggggacctattattgctctgaggcggctaagccatacctggaaaaaacaaaaggaactattattatcctgacatcagcttctgtgttcagcggaggtacagggattccccagtatgtaaccacaaaagcaggcagctatgcattgaccctgtttctggcaagagaatatgccaaagccggcatccgggtcaacggcatagccccggctgttattatgagcaagatgcttgtagagcggtttggatctgaggaggcagcccgggaacattacaagacagtaatgcctctggggagaatgggggagcctgaggatattgccaacattgccctgtttttgtcctgtgagctctccgaatacctgtgcggagaagtgataatcgcagacggaggcagaatgcatattggttagcagagaggagattgctatgaattttgataaagacttgaaggacttgacggatatccctgcactgagcgggcatgaggacaaaatgattgactatgtcctggagaagctcaggaagacctgtcaaaggattcacgtagacaagctgggaaatattactgcaacctatccggggacagagaaggacgggacgtctattgcattttttgctcacatggacgaagtgggattgattgtcaggaaaatagaagacaacggatttctgaggcttgagcgggtgggaggggttcctgaaaaggtactgcccgcagcatttttggaggtacatacactggatgaaacaaagtcatacaggggggtagtggggaatacttcccatcatctgacaccggccgacaaaaagtttgctgtcacaactattactgaactctatgtggatctgggctgcaaatcaaaagaagaggttttggaaaagggggttgccattggcagcgttgtgacctacctgcctaattatacgagcctgggtaattatgtggcatctaaatcactggatgacagaatgggaatttatgcactgcttagtatggcagagaaattagatcagagagaacataaggccgatgtgcatcttatatttaccgttcaggaagaattcaatatccgttcttcaactccgacctttcacagattacagccggatgcagctatctgtgtagatatttctcctgcctgcgatacgccggaattaaaaggaaggtatgagatggagcttgacaaaggggttgccattatgtatatgaacttccacggaagaggcacgctgggagggctgctgcccaaccccaaactgaacgcgttcctggaagagacagcgaaagaagagggactgaaatgccagaaagaagtggtcatcggggtgatcactgatgatgcatttactcagctggcgggaactgagggaatccccatggcccacttatcgattcctttacgctacacccattcccttgttgaagtggccagccggcaggatattgaagattgtattgctcttatgatggcggctgcctgcagattcagcagacaggtggatcttaccagaggcatcaaaaaataatatataataaaggagaatttattatgggaaaaaaatggacagaagaagtgctgggaacagacaaaccaattatcgctatgtgtcattttatggcacttccgggagatccgggatttgacaaagccggcggcatggaggccgtgattaaacgggccagagaggagatgctggcactgcagaagggcggagtggatgcaattatgttttccaatgagttcagcctgccttatctcacggatgtgagaacagagacggtagcggccatggcccgggtgatcggggagctgaaatcagatctggatattccattcggggttaatgtgctgtgggatcctgcaaagtctctggacctggcagtggcgacaggcgcaaagtttgtccgcgaaatttttacaggtgtatatgcaagtgactttggcctgtggaatacaaactgtggtgcagttgtaagacaccagcacgagattggtgcggaggatgtaaagctgttattcaatattgtaccggaggctgccaagtatattcagagagaagatatcagccagatcgctaagagcacggtgtttaactgcaagccggacgcactgtgtgtgtcaggactgactgcaggggcggcaaccgattcccaggtgcttgaaactgtaaaaaatgaggtgccggatacgattgtatttgcaaacacaggggtgcggatcaataatgtaaaggagcaattaaaaatagcagacggtgcagtggtaggcaccaccttcaagaaggacggaaaattcgagaatccggcagacgaggcacgtgtaaaagaatttatggatgttgtaaaagaattcagagccacattgtaaaggcggggaggcagataataatgaagattctgccgtcagtggcatctgccaatcagctgtgcctgggcaaagagatagaagcgctgggaggccataagtatctgcattttgatattgaggacggcaattttgtcccgaatataacgttcggtatgaaaaccattcgggcggttgtgtcaaaatatgataagatatgggatgcccatcttatggtcacaaaccctttgatgtatatagaggagctggggaaagcgggatgcagtgcagccgcatttcactgggaatccacgggttaccccctgcgggtgatccataagataaagagaatggggatgaaggcaggaattgcgctgaatccaaatacgcctgcaaatgtccttaagccgtatctcgaccggctggactatattttaattatgacctctgaaccagacggcgagggcgatctgtttcagaatgagatgattaaaaaagtagaatgtctggccaggttatgcggccctcagacagagattatagcagacgggggaattgctgaaaaagaattcctctgtctgaaaaaagcaggggccacaggggctgtgatggggcggactatttttgcatcagaacatccttgtgataccatagaaacattcagtaatttatacccggggacacaccacagtacttgccctgggtactgacatacggatttgccgtatgataaagtataagggggaagattatgccgttaaaagaggctttaagcagagaaacctgctacgtaggtgtgagcggggagagcagcgaggaagtgctgcgtactttatctgagcgtctgtttcagcttgggctggtaacagaggaatacggaacaaatgtaataatgagggaacagaaatatcctacaggacttcccttagaaggccgtaaggtggctatcccccatacggatgctgtatatgtaaaggaaaccagaatctgtgtggctgtactaaaacacccggtagaattccaggtcatgggcagcggctcaggagatacggtagcagtagagattgtgattatgctggccattaaagagcagaaagcccagcttggggtattgaaagatctgattaatttagtggtccagaatggaacgatgattgaacagttgattggggctggggatggagatgaggtgtatgatattttgacatcttatctatagatatttgagatttaacttcttaagcttgagactgcctagtcggaaggcatggggtggcagggggacggtgagacaaatcccgcggcagcgggccggctgattcggacaggaggaaggcttaagttccggggacacctccgtcgtgaagagagtctaagacaaaaccggaatccccgcaggagcaccgttcgtatgtgcaaagaatgcttgatgtgcattctctgcccatgctcactttttttcggccctgactgccgaaaaaatctcctgcgggaatcccggttttgcctaagactctctactcactcctgcggaatcgtccccggaacttaagccttcctcctgtccgaatcagccagcccgctgccgcgggattcctctcacctgggtatggggaagttccagggggttcgctatctatcaaaaacatcaagcggacaatagtacgaaataagagggaaatgtacaactctcaacctttcccccgttttccgtgaatgtgaagtgagtctctgccaggtcaagggaggaggtcttggggccaggggtactgggtggatctgtgcagactacggagtgcgtccgaagatccactgccggcggtcacttaggagcgaaggctttcctgagcttcttagtgaacggccaggcagttagctaaggagaaacgcagtagcaagcagatccacccagtacccctggccccaagacctcctcccttgaccgtccgtctgcgacactccgctcgccgactattttatctcgaactttacatacacaaaactattatttattagccgtcctcctatagatattcgccagcacagccccggatgtattatgccatatactaaagacagccccaggtatggtcgccaggggatactgcgcaaagtgtgtggatgccagagacgttgccaggccagcgttctgcatgcctacttcaatagagacggctctgcattttcgggtatccagtttcagggccttgcctacggcatagccggaggcatatcccagaagattgtgcaggacaacgacgaagccaatgacaacacccgacgtcatgattttggaggcattatcggacactactgcggcaacaatagcaacaatagcggttgtggagatgagcggcaggatctccacaattttctctgtcacggctttaaaaaagtgatggatgataaagccgcctgcgatgggtatgacaacaactttaaggatagataaaaacatgcttagaacattaacctctactctggtgcccgcaaagagataggtcaggggaggggttagaaagggtgcgagtaaggtggaaacactggtcatgcccacggagagcgctacatctcctttggagagatacgtcattacgttggatgaggtccctcccggacatgtccccacgaggattacgcctatggccagatctgtgggaagagaaaaaagcctggtcagcaaaaatgccagaagaggcatgatagtaaattgggccaggcacccgatgataacgtccttgggacggctgaaaaccactttaaaatcatttggctgtaaggttaatcccatgccgaacatgacaacgcccaacagagtattgacataagcagtttttataaaaccaaaggtatccggagtgaagagagccagagctgagacggctattacaataaccgccatataacggctgacaaagctggtaatttttcttaaggtattcataagggggtctcctttgacaaaagtatcttgtgtggtttgccggttaagtaaggaacagaaaggcccctgtctctacaaagagacaaagggcctaacctttgcgatactgtttttatcatagcaatctgtgatacaaatgtcaacatgaggcgtaccaaaaataaggcgaaatctttataaaaacccgcagccaagttcttccagttttttatccagccagggcgtggaatgcccttcttcggtttttatcatgaggggagtcagccgataatggcgcttacccataaaacatttccgaataatgcacaagtaagacacatgtatcaaaagatgtacgggcttaccagaggacctgccagacagtgccatacaagctgtctgaaaggggtacaaattaaaacaaaatatatgtaataaaacaaaatatgtgttgatttaagagcaggattatgttatattgatggtgaatccggataaattgctaagaatattaggtgaagtgcacaaaaactctggacaaaaaaagaacattagaaagggaggaaaaggatgagaaataagttttggagaaaatcaaaacggggactcgccttgtttatgggtattaccgtgagtctgacttccatgaatatgccggttttggcggctgaggcggatgatcttccgtcagcaaatgaggctgttctggatgaggaacccggaacctatgaaggtgatgttccggatctctcacagaatgaaacggatggagaaaaccgggaggacgaagccggggataatataccatcagaggagggcacagacagtggagaggctgcccctgtcatgctcaatcaggaggcaggcacaaattatactaatgaaagcccgtcccttccgggcatgggagaacagctttacattaacgatttcacaaatatggatgaactggatacctatccggggaacaatgccggtgattttaactgtgtggataatgcacttactataaccggaggttcaggtaataaggcaatcgtaaaggagcaaagttttacagattttgtaatagaagcagatgttaccgtggatgctcaggcagatatgggtgacaagtccagctctcaggccggtatcctgtttcgtgcttctgaggcctcaggcaatgtagctgatggatataatggatattacttctgtgtagatgctaagaacagcaaggtcactcttggaaaaaccaggggaaatcagtggacagagcttgcctccaagaaaacaaccgttaatttcggggagacctatcatctgaccgtagctgtctcaggagataagatctcttgttatgtagattataatggaaataattttgccaagattgaagcaaaggacagcgatcacgcggcaggaagcgtaggtgtcagaaactggctttccaatgcatcctacaggaacatcagagtctctgcctatacagaaccggaaatcgaaggggatacttatacaaacccgctcctttccatgtgcgcagatcctgatgtactgtactacaatggcacctattatctgtatcctaccaatgcaggggatgccaatgacgatcagggaattaaagtctatacatcaacagatttgattcactgggccgacaagggctgggcgctctccaaggatgatgtctgggggaatgcaaacttctgggcaccggatattattgagcgtgacggtaccttttatatgtattatgtatccgaggaacacctctgtgtggcaaccagcaagtctcctctgggtccctttgtccaggaagaaaagaaacccatgcatgatgatatcaaggagattgatgctcatgtattccaggacgacgatggacagtattatatttattttgtaagattcgataacggaaatgtgatcgaaggcgcaaaattaaatgatgatatgatgaccatggatgacagcactattacccgtgttctgacacctgacacaggctgggagacggatatggccagagtgaatgaagggccctttatgcttaagaaagatggtgtgtactaccttacatattcaggatctcactttgagagcaataattacggatctgggtatgcaaccagcgactcccctctcggcccgtatactaaatacgagaacaatcctattatgcagtcgaactccatggtacacggcgcgggccaccacggaatcgcggaatcccccgacggccaggagctgttcatgatctatcactgccataataatctgaaagatacagaacccaggcgtctgtgcattgaccgtcttcagtttacagaggacgcagacggcaatacggtactggaagtaaaaggacctacagtgacaccccaggcggctccctcaggatccgtgaatgtggataacctcattgaggtaaagagtccggaaggggagaatgtagtagaaaacggaactgcaccggaagactggaatattcaggcgagccttatcacttctgctcaggaaaaaggggtggaaaagaaggctgctgtagaatggaatgctgaaggctacgacccggcagacaaagaagaacagaaacttcaggtaacgggtaccgtgattctgccggaaggcgtagagaatcttggaaatattcctctgacagtcacagccaatgttacggttaagagagatatgtccacagaagattccctggacgagattctgggcaaggttgagattcgaaataaggataacattatggaaaacatcacgcttcccacagagcaggatggcctggcgcttacctggaagtctgataaagaatccgtaatctcaacaaaagaaaaagagaatgacaattattacaccacacctgccggtgttgttacccgtcaggacaaggatacatcggtgacccttacggtttcggcggagaaggacggggtaaccagatcccgggagatcaaaacaaccgtaaaggctaagccggagaaaaaagagtatgtcgcctatctgtatgcccattttaaagagcatcctggagaggtgggagaacaggatgttttctttggtatcagtaagaacggcttagactggacagccctgaataataatgaagcagtattaaagtctgaggttggcgataaaaaggtcagagatccttatattatccgttccgcagacggggataaattctatctgatagctaccgatcagaatatataccagtacggcggtgtggactgggagaagctttccactcaggggagccaggcactcaccatctgggaatctacggacctggtaaactggacagaccacagaagagttgttgtggcggattctgtcaatgccggctgtgcctgggcgcctgaggctatctatgacgagggcaccggagaatatctggtatactggtcaagcaaggtggctgacgacaattatgcaaggcagtataacttcgtatccaagaccagagatttctatacctttacagagcctgaggtatacaatgatttgagcagtaatattgatacttctatccataaagaaggcaataaatattataaactgattaagttagagaatactttacagaatggagataacacccatgtgattcttcagtctgcggaggatcatcctctggcatacggggaagaagtaaatgaagtagtcatcggcgacaaaacctacaagaacctgggcgcaaattatacccggatcgacaactctgcagacggctgcctggaatccttcaggggtccttacgaaggcgccaccatgtttaagtttaacgacagagacgaatggtgcgtcatggtagatgaatacggcggacagaccagaggttatatcccctttatcagtgatgacctggataaacctaataatgtaaaagcgctgtctaacaatgattatattatgcaggacggcggtaaacatggtgtcattcttccgattactcaggaggagtacgatgctttaaccgctaagtggggtgttgcaaaagaagagatcaatgagacagaacagaaagatcccgtaatttcctatgattttgaggaagaacttacagacggcacaataaaagataaatcagggaataatttgaatgccgcactgttcggcaatgctgcatacaagtatgacgaagagaaaaagagtaatgtattatacctggatggttctaagggtacttatgcacagctgccaaccggattcttcgacggtatggataatctgactataagtatggatgtaaagcctgagacaacagacacaaatcatgtggactttaacattggacaggatacaaacaaatatctctatatgaggttcagagactatgacattacttctggtatcactgtaagaaagtaccagaacgaatacaaacttatggatacagaaactggacgtctcaataagtgggtaaatgtcaaagtagtagtagaagggcataagatgtctatgtacatagacaatcagctggtgggagtaaatgcccatgtcagaagcgtggcagaactaggagaaaacctgaaatcatatcttggaaagtccttctatgatgacccttactttaagggatgctacgacaatatccagatttacaacagagccatgagctctgatgaaatcgtaactgcgagaaaaatgaaggtaaaaatggaggcggaaaacgcaagacttactttgcctgccaaggcggtggacagaggagacgcttccggcggcagaaaagttggaacgattgataattccagcgccacagtaacctttaccctggatgcgccaaaggctggaacctacagagttgatattgtatcaggaagcggtacggatcagccaaatgcatccgccaaatactatgtaaacggagatatctccaacgcaaaaattgtagattatatccctaagggatgggatgtatggacggcctatccggtggaagtggaactgaacaaaggactgaatacctttaccgttacacattccggaagagcaaacagcttctctgaactggactatattacattctacaattataatcccaagctggattccatcacattggacggtgaacctctggaaggctttgacactaacactcatgagtattccgtggaagtcaaagacttgagcaagattccggagatcaaagcgcagatggcagaagagtccaaagattactttgatgtaaaggtaactcaggcagacaacgagctgcttaccggaaaggttgaggtaacctccccgttggatgagagcttccatgaggagtacaccatccgcctctacgacagcagtgcattttccaatcctctggtgaattatggggcagatccctatgtgacttaccaggatggatattactattatgtaagggtgcataaggataaagaaatctatgtatcccgctcaaaagaattgaacagaatcgctgcaacgcagccgtatatggtctatacacctgtggagggtgaaccggacagagagctctgggcgccggaaatccactatctgaacggcaaatggtatatctattacaccgcgggagccggtaatgaccacagaatgtatgtgctggaaagcaagacagacaatgctctgggcgagtatgaatttaaaggaaaattagcaccgcccacagacaagtgggccattgaccagacagttctggaatacaacggaaaattatatgccgtgtggtccggctgggaaggggatgtaaatgtagaacagagaatctacattgcccagatgtcagatccgtgtaccatttccagtgagagagtggaactctcccgcccggaatacgcatgggaattgaatggaacaccaagaatcaacgaaggcgcacagattgcagtatcaccggacggaataaccaacattatttactctgccagcggaagctggaccgacgactactgtctgggcagactgacgctgaagaaagacggagatccaatgaatccggatgactgggagaagggaacagaggctgtatttatgaagaatgcaccttctacctattccacaggccatgcctgctttacaacttcaccagacggcacagaatcctatattgtgtaccatgcaacaagaggagccggacagggatggaacggtagaggcgtgcggacccagaaatttacatggaatgaagatggaactcctaattttggcaaggcaattgcatatgatgcaaaagtaaacaaaccttcaggaacaccggatacagagcggacccgcatagaagcggaaagcggagagcttgccaacagtgcggctgtggaagaaacctataactcctctgcaggaaagaaggtaacaggtctggacaatgaaggcgcgagtgtaaccttcaaagcagatgtaaaagataaaggtacctataaactgtatctcggcgcagctaccagcgcggacaatgcggggctggcggtatctgtaaacggtggagaagcggttgctaaagaagtggtttccttcaacgcttccccaggaaacggattatgcgtagacaactggatgggctatgaactggaggttgagctgaacagaggtgaaaatactatctctgtgggcaagagtgcggaactgacagcagcggatctggactatattgaattagagcttctggagaaagcgccttcagcagcgtgggttcaggacggagatcgctggatgtatcaaaatgaggatgggtcttttgttaaggatgactggaaactcattgaaggcaaatggtatcattttgaccaggcaggctaccggcagtccggctggattcaggatggaaaaacctggtactatctggcggatgacggagtgatggtaacgggctggctgccatatggaaatgcctggtattatctgaagagcagcggagcgatggctactggctggattcaggacggacaacattggtattacctgaagggcgatggaaagatggccaccggctggctgaaggatggtaaaacctggtattatctgaaaggcaatggaatgatggctaccggctggctgcaggatggcaagacttggtattacctgaagagcaatggggctatggctacaggctggctgttggatggtaaaaactggtattacctgagaagcaacggagcgatggtaacgggctggctgctggacggaaagacctggtattatctgaagagcaatggaatgatggccacaggctggctgaaggacggaaagacctggtattacctgaagagtagcggagccatggctaccggctggctgttagacggaaaaacctggtattatctgagaagcagcggagccatggccacgggctggctgaaggatggaaagacctggtattacctgaagaacagcggagcaatggccacaggctggctgaaacttggcagcacttggtattatctgaaggataatggagcaatggccacaggctggattaaggtgcagggcaaatggtactattgccagtcaagcggcaaaatggttgcggatgcatgggttggtaagtattatgtaaatgagtcaggcgtatggacaagaacaaggtagtatgaaataaggaaaagaaaaggagaaggactgtcccccaaaaagggagcagtccttctccttttgtcagcttctgtgcatagcccggaatgctttaggggtaatccccgttaattttttaaaacatttgttaaaataactgatgttagaaaagcctgacataagggcgatttccaatactggcttctgtgtggaaagcagcatgccgcatgccttttcaatccgcagataattcatatattccatgagtgttttcccaaaatgctttttaaagtatctgcagaagtatttgggggacatatgaaagaaaccggcaatctcattcagatatagtttctcagaataatgatcctccagataggaaagaatagacttatcaaagccggaggactgcacggtcttctgctggggaaccagcatatgttcttcgtacagacagctgataatctgataaagcatggcttttgtatagagctggtatccggggcactgctgtttgtttttttcaatcagcgtgaggatgcagctgctgatactgtttcggcatgcagactggcggggaatacttgtgggaaacaaaagggttccctgtataaggggcttcagataaaaagcctggctataatcttcccgggcgaatcccagggagtccagagggaatacataagcgtaataaagggattgggaatcctcggatttaaactggtgaatcagtccgctgttaataaagcagatatcccccggcaaaagattgtaatccgtaccttccactgtgagaatagtggttccctgaatctggcagattacctctatctccctgtgccaatgggcgctgacaaacaaatgccctgtctcgttattcatttcatagtgctgaaaagggaagagaaaagtccccctctgctgtatttcctgaaagactgaatccataggctccctcccttttatgtggtgaaaataatgttattccaaaggcgaaaaaacagaagaatcctgcagttatgtgagatataattccagtataataaaaatctgataaaaatcaaggagaaaacagatggagaaaaaatggtggcacgataaagtagcatatcagatctatccaaagagcttttgtgatactaatggagatggaattggggatctgcggggaatcatagaaaaactggattacttgaaggagctgggggcagatattatctggatatctccggtatattgttctcctatgaaggatcagggatatgatatttctgattattataacatagaccctgtctttggaaccattgaggacatggaggagctcctgagtgaagccaggaaaagggaactctatattctaatggacttggttatcaatcattgttcctccgagcatgaatggtttcaaaaggcactgcaggatccggaaggagagtacgggcggtatttttatattcgaagaggaaaggacgggatgcctcccaacaactggagagggaacttcgggggcagcgcgtggtcccggattgaggggacggatctgtattatctgcacacatttcatgagacccagccggatttgaactgggaaaacccggctgtgaggagaaagctgtatgagatgattaactggtggctggagaaaggcctggcaggattccgcattgacgcaattattaatataaaaaaagaactgcactttagaaattatcctgcggatcgggaggatggtacctgcagtatccgatgcatgctgcaggaggcccagggaatcggggaattcctcacagaattgagagagaacacatttgaccgttacaatgcatttacagtggctgaagtctttgacaataaaccggaggaactggaaaagtttatcggagaagacgggtacttttctaccatgtttgatttcagcattgagtctgcacgtacaggagacaactggtacgagatgaatcagctgcgtccggaggagataaaaaaaattatctttgacagccaggaaaggacccgggagataggtcttctggcaaatatcatcgaaaatcatgacgaacccagaggtgccagcgccttctttgcggaggaaccggaccgtgaggaaagcaaaaccatgcttgccgttttacagcttctccagcgaggcattccttttctgtatcagggccaggagataggaatgacaaatgttgttttccaggatattgctcaggtagacgatgtggcttccagggatcagtatcaggcagcgctggaggcgggatacagcgaagaagaggcccttagaattgtaaatctgcgcagcagggataactgccggactccctttcagtggagcagtgaaaaaaatgcgggattcactgacggcactccctggcttatggtaaacagtaattacagaaaaattaatcttaagagccagcaacgggatgagagatccgtttattctttttataaaaagctaatccggctgcgaaaagaggaggagtataaagatacttttgtatacggaacattccgtccggcatacgaggaacacaacaatatttttgcttattaccgggagagtgagaggcagagaattgctgtgatagcaaactatcagaaagaatcacaggagcttatgctgacagaccagtgcgaaaaggttctcctcaataattacagagacctcagtctgaagggtgggagactgtatctggaaggatatcaggcggttgttctactgctgaaaaaaattagctgttaagtattgtataaaacagacaaaaagtaccatgctaaattgtagaaataatggaatttatttttaaaacttgcggcacactgtaaagtgtgctactataaaatcgtcaattggaaacgttaccggtaaagataccgacaacgtttccgaacgagcgaaaggataaccgataatttaaaagaataaaggaggatttatcatgaagaagaagctggtagcagcagcactctgtatggcaatgactgctgtcacattggcagggtgcggagaggacaagggagcgtcatctgctaaggggagcgtatattacctgaactttaaaccggaggtaacggatatctgggaagagattgctcagaaatacacggaagaaacgggtgtaaaggtaaaagttgtcactgcagcgggaggaaattacgagtcaaccctgaaatctgagatcgccaagtcagatgcacctaccctctttcagattaacggacctatcggataccagtcctggaaggattactgtgcggatctgagcgacacagaattctataaggctctgaccgatccgtctctggctattacaggagatgacggcggggtatacggagtgccctatacaattgaaggctacggcattatttacaacgatgagattatgcagaaatattttgctatggaaggagcagcagcttcttctgtggatgagattacaagctttgataagctgaaagcggttgttgaggacatgcagagtaaaaaagatgccctgggaataaaaggcgtgttcgcctccacctccctgctgcccggagaagagtggagatggcagacacatcttgccaatatccccgtgtacgcggaatataaggataaggatgtggatgacttaaaggaaattgattttacctacgcggataattttaaaaatacctttgacctgtatctgaacaattccagcacagaacctaccatgctgggcagcaagggtgtgaatgattctatggcagaatttgcccttggccaggtggctatggtacagaacggaaactgggcatggagccagattggagaggttcaggggaatgtagtcaaagaagaaaacattaagtttatgcctatctataccggcctggatggagaagaaaatcagggcctttgcatcggtacagagaactacttcagcattaacagccagacctcagaggcaaaccagaaggcatctgttgattttgtgaattggctgattaattctgacacagggaaagattatatgaccaataagctgggcaacgtggcgccgtttactacctttaacgatgaagaaaaaccacaggatcctcttgccaaatctatgctggattccatggaaagcggcaaagaatccattccgtgggtatttactaccttccccagccagacctttaaagataactttggagcggcccttttagagtatgcacagggcagcatggagtggagcgatgttgtaaacacagtaaaagaacagtggaaggctgagaaagcagccgttcaggagtagatatcagggcgggcagctttggctgtctgccggtactaccggataaggagaaggaaatggataaaaatctgaaaaaatattttcctatatttgtacttcctactctgcttgcattttttattgcttttgtgattccctttattatgggtgtatacctgtcattttgcgacttcactacagtaacgaatgcaaaatgggttggaatcgataattacatcaaggcgtttaccaacaaagaattcctcaatgccctttggtttaccgtccggtttgcagtggtagcggttatctccataaatgtgtttggatttcttctggccttgctcctgaccagaggaatcagggggacgaatttattccgcaccgtattctttatgccaaaccttatcggcggtattgtgctgggctatatctggcagtctatgataaacggtgtgctggccaaatatcaggttactatgctgatggatgccaagtatggtttctgggggctggtaattcttatgaactggcagctcattggctacattatgattatttacattgcgggactgcagaacatatcgcctgatttgatggaagccgcgaaaatagacggcgccaccagctggcaggcgttaattaaaattaagattcccatggtaatgccgtccattaccatctgcctgttccttacaattgccaattcctttaagatgtttgaccagaacctggcgctcactgccggagggccgtctaataagacaactatgatggcgctggatatctataatacattctacgggaaggtgggatttgagggagttggccaggcaaaagcggtagtattctttgttatcgtggctatcattggaatctcacaggtagtattatccagaaagaaggaggtggaaagctgatgaaaaaacaaaaagcggcggatacaggcattctttgccttttgattgtgctggtagttgcctttatcacacctatcttctttgtgctcatgaactcttttaaaggaaagctttacatcagtgagaatccatttagctttccaagaggagaattgttcgcgggcatcaccaattacacagagggaatccgtaagaccggttttttccaggcctttgggtattcggcgtttatcacagtgttctctgtgtttgcaattgttttatttacctctatgacggcatggtacatcaccagggtaaaaaataagctttcctcagttttatactatacttttgtattttccatgatcgtacccttccagatgattatgtttacgatgtcaaagcttgcagataccttaaagcttaataatcctctggggatggtggtactttatctgggattcggagcagggctgtcggtgtttatgttttgcggttttgtgaagagcataccactggatattgaggaggcggctatgatcgacggctgtacgccgctgcagacctactttcagattgtatttcccatcttgaagccaacagccattacggtggcaatattaaatgcaatgtgggtgtggaatgactacctgctaccatatctggtgataggagtatccacaaaatataaaaccattcccgtagtggtacagtatctgatggggtcttacggagcgaaagactatggatccttgatggcactgcttgtgctgtctattataccgattattatattttatttattctgccagaagtatatcattgaaggtgtagttgctggcgcagtaaaaggttaggagaattgtaaatgcgatcaagtggaatattactgcctgtttccagcctgccatcggaatatggcattggatgtttttcaaaaagtgcatatgagtttgttgacaatttaagagaggcggggcagagatactggcagattctgcctttgggacctaccagctacggagattcaccgtatcagtctttttccacttttgcaggaaatccttattttattgatttagaggcactgatacagcagggactattgacagaagaagaatgcagaaccgcggactttggagaagatgcccaatacgtggattacgagaaactttacagaagcagagatgcattgctggggacggcatgccgaagaagcgggctgagagaaagccaagagtttcgggactttttggccgagcagagagagtggctggaagactatgctctgtatatggcaattaagaagaaaatgaatcatgtcagctggttggaatggccctgcgaactgcgggacagagatccggatacgatggagacctgtcggagggaactgggggaggagatttatttctatcagtttgtacaatatgaattttacagacagtggaatcagctcagacgctatgccaaccgtcagggagttcggatcattggggatattcccatctatgtggcgctggacagctcagatgtttgggcagaccgggagttgttccaattcggggcggacggactgccatcagccatagcgggctgtcccccggatggtttttcggccaccggacagctgtgggggaatcccctttatgactgggaccgccaccgggcgaccggatatgagtggtggatccggaggatgagatgctgcagtgagtggtatgatgtggtgcggatcgatcacttccggggatttgaccaatactatgccattccttttggggataagactgcagagcatggccaatggcaggatggccccggcctggaactctttcaggccatacaaagggaattgggagagatacaggtcattgcagaggatctgggatttattacggagggagtggagaatctggtccgggatacgggatatccagggatgaaggtactggaatttgcctttgactccagagaggccagcaattatcttccccatacgtatacctctaattgtgtagtgtatacaggcacccatgacaatgagaccattaccggctggtatcagaatctctgtccggaggatctggagtactgccgggaatacatggggaactgccggacacccctggaagagattcactgggattttatccggctggctatgatgagtgtggctaaaatatgcatcattcccatgcaggactatctggggttagacaacagagcccgtatgaaccagccttccacagtgggaggaaactggagatggagactgcagaaaggccaaaccgatccaaaattgcttgaaaaaatacggaaattaactataattagtggtaggtgtaactactgatgatagagcaggaggaaaggaagcaggcatggaggaagtcacaatcaaggatattgcaaggctctgcggagttggcgtaagtacggtatcccgtgctattaacaaccacccggatattaatcctgagacaagggaccatatattaaatatcataaaggagtacaattacattccgaataacagtgcccgaaacctgaagcgaacggaatccaaaaccatagcaatcttagtgaaagctatagacaatccttttttctcaagtatgatacgagtctttgaaaaagagataaaatatgaacgatttgattttttcctccagcatattgacaacaaccaggatgagatagaggttgccatagggctggctaaggaaaaaaaacttatggggattgtattcctgggagggttctcagaacacagcgacgaggcactcaggcagcttaaggtaccctttgtggtaagtaccgtggagctggataattctgtggaagacggtctgtattcatttgtatctgtggatgacaagaaagagagcagaaggcttgcggattacctgatcggccttgggcacaggcgaatcgcccttttgtccgcccaaaaggatgatgaaagcatcggcaagctgcgtatggagggctataaaagcgccctcgcccaacacggaatccccttagatgaagacctgattgtctatacccccaaggactgcgaagtgtattccaggaaaagcggttatgtgatgatgcagcagcttatggagcgtgagaaagactttactgcggttatcgctatttctgatatggtagcagtgggagcctgtaaggcagcatttcaaaaggggaaaaaaatacctgaggattattctgttgcagggtttgacggtctgccggagactttctattatgaaccgtctatcacgactataaggcagccactggaagagatcgcggaaagttctattaaaaatcttttctatatgatccgtcatgaggaaaaagcccccaacaagaagttcgagggagaacttctgaaacgggagtctacaaggaaaattggataagtgagacaagagacagagacgtgagggatgtcccccgcgtctctgctgctatctggcactgcggtattctctgggagtcatgttaaattttctcttgaagaggcggttaaaataagataaattggagaatccgcattgctccgcaacccacaggatagattcctctgtctccgaaagatatttggcagagatggacagacggtagtcattcaggtattcggtaaaggtcatatccatattttgtttgaaaaatcgcataaaatgagacggactgaaattcagaaacccggcagcatctgagagggacacagaatgcatataattttcctccacaaaggtaaggaccttcttcatccgctgaatattctgctctcctgcgtagctgacttcctgccggggctgggcggaaaaaagaagaaaaaagaagcggtacaggatactctttataaacagctcataatagggttcctgcctggaacatatatcgtccagctctttgatacatccataaaggccagggtaataaggatatccgctgtggatgtgggaggggacgaagtaccttctttcaaaaaaaggccgcagatattctgtggtgcagatatcagggtgctgagagtagaggagccgggtgtcgaaaagaatgttttcatattccatatgctgatcacaaagctgagatatagagtgaagctgtccgggaagcaccagtatgatatcacctgcctgtacttcatgggaaatcagatccacgtctgtcctgccctgtcccttttttataattatgagctctagttcatcgtgccagtgagtagaaatattagtaaagtccagaggaatggtacacagataggtattataaggaaagcggggattcacatgaggtttggtttcgtgataatattcgtaatcgaaggctttcatgttcggctcctttttctatgacatgatagtattgtatcacttttttctggaataatgcaagaaatcaggggataataaacgtataatatataaaagtgctattgagaactgggtgaacggcaacataaaagtgctactatgaaaatgaggtgaagagatggagtttttagagagatttcagggattactgaaaaaggatatcagagaggcagcgaaggaggaggtgtattgtgcccttcttgagtcggtaaaggcttgtgctgcagaaaaggtgcagcagggaaaaaaaggagagaaaaaggtatattatatatctgcagaatttctgattgggaagcttctcagcaataacctgattaatctgggggtatatgatgaggttaagaggtatcttgaggatgccggaatgagcctcggagaaattgaggagtttgaaccggaaccttctctgggaaatggaggacttgggagactggctgcctgctttttagattctattgccacactggggctgggtggggacggcatcggtctgaattaccatctgggcctgtttcgtcaggtgttccgggagaaccagcagaaggagatgcccaatccctggatagaaaaaaagagctggctgacagacaccggaattgggttccaggtaccgtttaaagattttaccttaaagtccaggctttatgacattgatgtcattgggtatgaaaacggtgtaaacaaactgcatctttttgatgtagataccgtggatgacagtattgtaggggaaggaatctcttttaataagaaagacatccccaggaatctgaccttgttcctgtacccggatgacagtgacgaagacggggaactgctccgcatctatcagcagtattttatggtaagcaacggcgctcagtatattttgaaggactgtgaggagaagggctatgatcttcacagactgtacgagcacgcggtgattcagattaacgatacccatccctctatggtgattccggaattgattcggcttctcatggacagaggaatccctggggaggaagccattgagattgtatcccgcacctgcgcctataccaatcataccattcttgcggaagcgctggagaagtggccggtttcctatctggaggaggttgtcccccatctgatgcctattatccgtatgctggccgagaaggtggagcatacctacaaggatccccaggtacagatcattgacggggaaaacagggtgcacatggccagaatggatatgcattatggattcagcgtaaatggagtggctgccctccacacggagatacttaaaaacgtagagctgaaggcattctataagatatatccggagaaatttaacaataagacaaacggaattacgttccggagatggctgcttcactgtaatccaagactgacggagtttctggataccctaatagggacaggatataaaaaagacgccgccgtgctggagaagctgttgtccctgaaagacgaccgtgaggtgcaaaaccggcttctggagattaaagctgagaataaaaaggatctgaaatcctatctggcaaagacgttaggcgtacagctggatgaaaacagtatctatgatatacagatcaagcgccttcacgagtataagcgccagcagatgaatgtgctgtatgtaatctacaaatatctggagattaaaaaaggaaaccttcctcaaacgcctatttccgtgatcttcggggcaaaggcagcgcctgcctataccattgccaaggatattatccatgtgattttatgccttcaggagatcattgaccgggatccccaggtaagtccatatctgaaggtggtaatggtagaaaactataatgtatctatggcagaaaaactgatcccggcctgtgacatctcggaacagatttcccttgcctctaaggaagcctcaggtaccggcaacatgaagtttatgcttaacggggcagtgaccgttgggacggaggacggcgcaaatgtagagatccacgaactggtgggggatgaaaatatctacattttcggggaatccagccggcaggttatcggacactacgagaaatccgactatagggcagcggagtactacatcaatgacccgctgatccgtgagcttttgaactttattatcagccccgagatgatgcggactggggatccataccatcttctccgcattcacgcagagctgattcaaaaggactggtttatgacgcttttggatctgagagactatattgaaacaaaagagcggatatacagggattatgaggacagagaagcatgggcagagaagatgcttgtgaatattgcaaaggccggatacttttcctctgacagaactatcagtgagtacaacagggatatctggaagctttaatcgggcttcgcccctcaaaccggggggcggagctttttgggccgtaagtctggcgcagcctcaggctgaatgaaactgcggggattgcggattgacggaaaattgacatttctgtggtatagtagggagaggaaggagggagcaggcgtgtatcagagacaatactgtatcctaatcgtagacgacgaggagatgataagggaacttctgtctgattttttttctgaggagggctaccgggtactgacggcccaaaatgcggaggaggcaatgcatgctcttggcaggaagcctgacttggtattgctggatatcaacatgccgggaaccgatgggttgacgttctgcagacagatccgcagattttaccagagcccgattctttttctcactgccagggggacggatcaggatcagatacaagggcttcgcatgggcggggatgactatattatgaagccgtttcatttggacgtgcttgcccagaaggtaaagacacatctcatccgggaagagcgcagccgggatacctgtgcattgggggccggctgccgcattcaggagaaccttgtgattgactatgataagcacctcatttatggggctgattatgagatagagttctcaaaaacagagtttgagatcatagaactgctttcccttcacccgggccagatttttgataaagagcgtatttatgagagcgtgcggggatttgacggaaagggcgacagtcaggtaatcaaagagcatatccgaaagatacgccagaagctgtcggcagggaaaatagaggacccgattaaaactgtatggggagtgggatatacatgggaaaagtgaaagaagcatttaagaacatgccgattcggaaaagccttatgctccttatgggaactatgatacttctggttgtcctgctgacggtcctgaccctgtcaggtctgcgggcgctgcagggccgtctggagaaggggagaggactcttgattcaggggtacaccctggaaataggggagacgcacggggaggtgaaagtaaatcccagtgagtatgaattcgaagacttacagggaggaaagaagcttttatatgaggcggcaggcgcaggaaatattatattcccggttatttacagcatcggtggggtcgccgcagccgcctgtctgttttaccgcaggaaattgaaagaaccaatgactcttctgtccggcggcacacagaaaatcgcagagaataacctggattttacggtttcttattcttccggggatgagctgggacaactctgtcaggcttttgaagggatgagaagcgctctggaggaaaacgaaaagaagatgtggaggatcctggaagagaggaaagaagtaaatgcctctattgcccatgatctgcgcactcccattacgatcattcagggagcggcggagtatctggaaaaaagcgcagggaaaggggagctgtctttccctaaggcagagaaatatgcggttatgatccggacggcatccgagcgtatggaatcctatgtgaattctatgcgggatctgatgtgtctggaggaggtgcgcctaagtcccgggaaactacaggttcaggactgggttaaggggatggaaaaggatttggagcttctggctgaacgggcgggaaaaagcctgaagcttatacctccggaaagggacttttgcctgtttggggatcccactctgatgaggcgtgtgattgaaaatcttacggcaaacggtctgcggtttgcctcccgggaagtgacggttaccgttaccggggcggaggaagggcaggcgtgcgccgtaaaggtggaggacgacggtcccggcttcagggaacaggaggctgccgacgcctgccttcctttctattccagggagaaagagggagaacagggacatgtggggatgggactgtatgtcagtaaggttctgtgccaggctcatcaaggctctttgacactggagaacagatccgagggcggagcggctgtgacagctgtattttgtgcagtttcccataaactgcctgctatgtaatatttagaaaattgacagacttttgaccagggttcgttatactctccttaagctgctgcagacggcggaaaggagagtattttttatgcgtattgagatgcaggagatagaaaaatggtacgggaaaaagcaggtgctaaaggggctggagtggaggctggagcccggaatgtacgggctcctggggaagaacggggcaggaaagacgacgctgatgcggatcctagcctctatattgaaaccagatgccggggagattcgggtggacggaagccccataagggatgttaaggaattccgcagacgaatcggttatcttccccaggaattctctgtatacccagagatgcgtgtgacagaggttctggaatatctggcagttctttcggaactcccccggtctgcttacagaccacggataaaatctttgctggaacaggtaaatctggaggaacaggcggctaagaaagtaagacagctttccggagggatgaagagacgtctgggcatcgcccaggctttgctgacagatccgggatttttgatcgtagatgagccaacggcaggtctggaccccgaagagcgcatccgcttccgcagccttttggcagagtctgccagagacagaattgtactactgtccacgcatattcccggggatgtagaggccgcctgcggacaggcggctgtgcttgaccagggcaggttcttattccagggcagctgccgggaactatccgaaaaggcagacgggaaggtatggcagctggaggtgcctgtggagaaagaagagacgtggagacaaaactgtgaagtgctggagacacagatgctggggaaaagtctccgtctgaagatacttgccgggaaagcacctgacccgaaagcagaatgctgccgggggagtgtggagaacggctacatggttttgatacgcagccagggaaaggagggcctggaatgaggctattgctcaaggaatgcagaaaactcagcaaaagcatccttttttggggatttgttcttatattaataataaactggaagacgcagtttcagggagttaccaggcaagagataggcagcagctccagggagggaagctttctgcatcagccccgggagggcgagtcctattatggggagaaaccggcggatttggagacggataagaaagcccaggagaaggtaatggccggggccgtacaaaccatggtacgggagtatgagagcaacctctatgcctgctatcccctggggtattataaagaaaaatccttaggcagcggggaacaggagaaggttgcgggatacatcagagaaattacaggctgcacgccggaggaagtagagaacatgcctccgggctattttcctgcaaacccagtctatgcggaaatacctgcttccggaggggatggggacagttcctatactatcagggaagatggcggaagatttataatagaaacagagcaaaaccaagggaatggtgccgctgagacctttgtgtcccgggttagctttgcccgctttctggagatcgccggagatatggaacatatgataggaaaggattccaactatagcctgaatcttttaaaagcatattacggacgtacggaggtttcatatgaagaggctgcaaagcggtatgggaacctgacagagaaggatgggattaccggtgcattcggccgcctttactgtgactatatggggattatgctggggatacttcctgcgtttgtggtgtcaggactgttcctcaaggataaaaaaaatcagatggcagagctgatagctgtgagaagcgcgggcagctggaaatttataggagcccgttacggagcgtgtatcattatgatgctgatcccggtacttgttctgaccctggagagtcttcttcccctggcggattatgggagaaaaatgcagattgctgtggactatctgggcttctgcaagtatattggcgcatggctccttcccaccctcctggcagtctcagcggtgagtatgtttctgaccgtgcttaccggtacgcctgcagcagtctttgtgcagagcgctgtattttttctggccctgcagaatacagccagcttaagcggtgagtattccctcttcactttgaatatacgtcataatatgctggggggatatgaactgattgaggaaaatctcaaaatcatttggtataaccgtctttttctggtgggaatagccgcattattcgctggattgactgcagcagtttatagcagaaaaagaagaaatggagagagaaactatgtattggagaataaatttcagactttgcatcgcaaataaattactactgacagccggtctgtttgtattaatcccgtttctgcacggggtcacgtatctggatgctcaatacagtgctgactgtctggaaaaatatgtggccctgacgggtctgcttctgtttcctgcactggcggcaccggagcaggaaagggagatttttgaaatggtagcggcccggcccaaagcacactggaagactatagggcagcggatttgcatggcaggcgcagccgtttacctctgtattctggcctttggggcattactcagggcgggtcactgtgagtttccatactgggcctatactgccgggactttttgcaccgcggcggccctgggaagcttcggtctgctgggcgctgtcatatcccgaaattacatagctggatatctggtctccctgggatattacctggccaatctgttcgggggccctgataagatgggccctttttttctcaatagtatgacagcccaggttgtgggtcaaaagcctgtgctgctctgtatctcaggggtgtgcctgattttaagcataattagaatcagatatcaaaagtaaatcaatttttgctgttgtctgcgcactgttctgcaagatactttcgcggtaaaagttgccgccgctgcttgacgcaggagaaaatatgtgatatagtagacaagcgacatggaagtaggtcttttttttatgcctaaaattgcgggtatggtaaccgcagcaggcggaaaaaaagtccgttgtaacttggtagaacgtgaactaccagcgatattgaacacatggaggtggaagtcgtgcgcgtaaagatcacattggcatgtacggaatgtaaacaacgtaattacaacatgacaaaagaaaagaaaaatcatccggagagaatggagaccaaaaagtactgcaaattctgtaagacccacacaatgcacaaagagaccaaataatccggtccgcgagaggtgaaaccatggcagaagaagtaaagaaagagaaagctcagaaaaagagctggtttgcgggactccaaaccgaattcaagaaaattatctggcctgacaaaaagacattgggaaagcagacggttgccgttgtggtgattactgtgctcctgggcgctatcattgcagttcttgacagcgcggtcttagagggaatcaatttcttaatcaggtaaggacaagggtgattatatgtcagaagcaaattggtacgttgtccatacctattcagggtatgagaacaaagtaaaagccaacattgaaaagacaattgaaaacagacatctggaagatcagatcctggaagtccgtgttcccatgcaggacgttgtagaacttaaaaacggcgtaaaaaaacaggtccagaaaaagatgtttcccggatatgtgctgctgaacatggttatgaacgatgacacctggtacgttgtaagaaacaccagaggtgtgaccggatttgtaggaccgggttccaagccagtgccgcttacagaagaagagatgaagcctcttggtattcatgaagcagatctccaggtagactttgcagaaggggacagcgtagttgtcaccggaggcgtatggaaggatactaccggagtgattcagagtatcaatgaaggaaagcagattgttaccatcaatgttgagctcttcggccgcgagacgccggtagaaattagtttcgcagaagtcaaaaaaatgtaacaaaaggaagggctgtcctgacggatagctcgtgggagggaaatccccgacattaccacattaggaggtgccaaaatggcaaagaaagttcaaggctatattaaattacagattcctgctggaaaggcaacaccagcaccaccggttggtcctgcactgggtcagcatggtgtaaacattgtacagtttacaaaagaattcaatgctaggactgctgacaagggcgatgtagtaatccctgtagtcatcactgtttatgcagacagaagcttcagctttatcacaaagactccgccggctgcagttttattgaagaaagcctgcaatattaaatctggttccggtgttcctaacaagacaaaggttgctacaatttctaaagctaagcttcaggaaattgcagagacaaagatgccggacttaaatgcaggatctctggaagcagcgatgagcatggttgcaggtactgcccgcagcatgggaatcactgtagaagattaagatacccatctccggcctcattgattcatgcttcgtgcatgagaggaataactgagagatgataccgtataattacgacacgtgggagggaaattcccgcaattaccactaggaggttatttaagatgaaacatggtaagaaatatgtagaagctgccaaagcagtggaacgcttcaaattatatgatccagctgaagctgttgcagtagtaaagaaaacagcggtagctaagtttgacgagacaatcgaagctcatatcagaacaggctgtgacggacgtcacgcagatcagcagatccgtggtgctgtagttcttcctcacggaaccggcaaaaaggttcgcgtattagtatttgctaaagatgcaaaggcagaggaagcaaaggcggcaggggctgaattcgttggaggggatgagttaattcccaagattcagaacgaaggatggctggactttgacgttgtagtagctactcctgacatgatgggtgttgtaggacgtctgggacgtgtcctgggtccgaaaggcctgatgccaaaccccaaagcaggaacagttacaatggacgttaccaaagctgttaatgatatcaaagctggtaagattgagtatcgtcttgataaaacaaacatcattcacgtgccaatcggaaaagcttctttcacagaggagcagttagcggacaacttccagacgcttatggatgctattaacaaggcgaaacctagcgcattaaaaggaaccttcttaaagagtgttaccatcgctccgactatgggacctggcgttaagatcaaccctgttaagttagtataatagatttgcaacaaaaatgtattgacagcctgtccggcttttgatacaataccaaaggattatatgaaatctcatatatcactgccgaagacagcaggtgccgtatggcataaggatgaaaccgcctgccgaggaatgattttttcttttagataagaatcaatgtgccctctttgtcctcggataaagagggctttttcattgctataatggaaaatccgacggcggtacactaaaatttataaggaggtgcaccaattcatggcaaaagtagaactgaaaaaaccagtcgtagaagagatcgctgccactattgccgatgcccagggtatcgtattagtaaactacagcggactgacagttgaacaggacacaaaactgcgtagggaattaagagaagctggtgttgtatacaaagtatacaaaaacacaatgatgaactttgcattccagggaacatcttgtgaagcattatgcaaacatctggaaggaaccaacgctcttgcagtgagcaaggacgatgcaacagctcccgccagaatcctcgcaaagttcgctaagacagctcccaagctggaattagtagcaggtgtcgtagaagacgcatattacgacaaagccggtgtggaagcacttgcagctatcccgtcaagagaagaacttctcggaaaactgcttggaagcatccagtcacctatcgcaaactttgctcgtgttatcagccagattgcagaatctaaagaagcagcaaactaaactataaaattaaattattggaggtaaataaaatggcaaaattaacaacagctgaatttattgaagctatcaaagagttatccgtattagaattaaatgatttagtaaaagcatgtgaagaagaatttggtgtatctgcagcagcaggtgttgttgtagcagcagcaggtgcaggcgcagctgaagcagcagaagaaaaagatgagttcgacgtagaattaacagaagttggaccaaacaaagttaaggttatcaaagttgttcgtgaagctactggcttaggcttaaaagaagcaaaagaattagtagacggagctcctaaggtaatcaaagaagctgcatctaaggcagaagcagaagatctgaaagctaagctggaaggcgaaggcgctaagattactctgaaataatttttaaatatagttactcccccagatgtccatttgcggatgtgtgggggagtttttttgtgcctgcttacaggtcttccagacgataagaaatcataaggtgaagacaggtatcgtaatcatccaggttaaaattaataatctttttaattcgccccatacgttcgataaacgtggttctgtggatatatagagaggcggccgcatgggtagtgttgaaatggtggtacagatacgcctttaaggtttcgttgtatgatgtatgattatctctgtcatattcccgtagtttcaatagaccgtcggcgtataaggtgccgggggatgctagatttttgcattcgattaaaagatacaggaaagcatattcttcaaacgtatgatgccagatagtgggttgaaaccgatgcccaagacgcagtgctgcaactgcctggcggtaatattcggatatgctgaaaagaccggaaaatctgcggctttttccggtctttaatatgctctcccgaaaaatatagatcaggcggctttcaacaaattctatatcctgacctgccctcgtctggtttatgagtaatacaatattatccttgtattcaaaagcggtgcaaaatgaaaactctgtcatcaagtttttacatataaaggcagaggttttgcttcttctgtcatcttcacttaattgaacataatagagaacaaaagtatcctccatttcccatccgtgattttttaaggtctgttccaaaatataagaggatacttggtgtccgtccagtatttgcattaaggtatgtcttagagataagggctgagatacattgctgaagataaattgctcataatataaatgtacataagggcgaagcgcattcatgagataatagtgtccttctaaaaaaggagtgttgacttcaaaaatcaacactctcgccacctgactttcccggtgccagatgttgaggcaaagattgtgcgaggttgtaatatcatttacatataaaaaggcttctttgtattctgatacagcattaaatatagggtcgaacttcacagaattgacaacatccaatggcatatttccgtctttatctgccattaattcggctgtctcgggggtgtttcccaattcaggacttttggccaggtaatgaaagttcatatctactattgccacaggattcctaaatatattttcgaacacggtaattactgtctggaagcctaattgctccagaagcccctgatttaaactgctttcatagttgtcataaatattatacacttcctgcagttcattaaaaacagaagagatatgttggacagtttctatccatataatgtttagagacagcttcgtatattcggcgggaggtttaccaattgccacaatacagatgtttgatggactctggttttctgacagaggaggaagatcactgcttctggcaacatatatctcattttccacaagactagctccgggcgtatacaggcgcggtctgctgtatgcaaagtttgtgtcgacacaggtgacaaaacagagcgtatagttgcgggaaagtgcctcataaataaccattatgtttagcttcatatacatctcctatcaaaagttataaactatacactactaattgtagggaaaaagagcaaaactgtcaatagtgtgcggggtgtacaaatagcatttgtggtgataatattgaattcataagaaagagaagtgctataagccatattggcaacactacatgttgtaccgcctgcaggggtattctgtgtctataagcgtagaaaagggaggaactatgtcaatgaatattaaggaaaattacatggcgctgttgaacggagaaaaaccagaacgcttggtaaatcaatatgaaccatttgcattcgtattgaatgaacctctccttgcacagacgatggaagggcgtattgaagggcaggatgccaaagatgcatggggggtaactatgcggtggaaaaagggggaccacgccggtatgccctatgtgactgacaataataaagtatgcccagatgtatgtgactggagaaatacagtgaaagctccttctctggattttccggaggagacgtggcaggatgctattagagttgctgctgccgttgaccggaacgaatatctggtgacagggctaatggctacggggctgtttgaacgctgccattttttaatggggttcgaagacacattaatgaattttctcatggaaccagaggcaatgcatgaacttttggattacctgctggattggaggatggagtatgcaaaacagctgatagatcatcttcagcccgatgcgatcctatcccacgatgactggggtgccaaggaccgtctttttatgagcgcagagacctggagagagttttttaaacctaggtatgaaaaattatattcctatatcagaaaccgaggcgttcaggtgattcatcatgccgacagctactgtgcaaatattatagaggatatggtggatattcatattcaggtatggcagggagtgctgccggataatgatattcccaaactgcagaggcagctcaatggccgtatggtactgatgggggggattaacggaggagtatttgacttcccggagtggaaggaagaggaggttcgcagagaagtgcgtcgagcctgcaatgcaagcaaggagctggggggatttatcccgtgcattacttatggtttgccggaaaccatatatccgggcgtgtttgaaattattgaagatgagatcaatataattaatacggaagtataaaatagatgggaccggggtgatgattaggcatcattccggtcttacttttgctctttttggtcacagaaatgctttacgtgtgacttgcgtgtgacaatttccggctataatacaatcagatagtgaatcattctaaacatgtttttagattttaatataaaggagctggaatatgaagaagaaaatagcgctcataattacggcagcaatcatgatggttgcgactattataggggggacgatggcggcaatacaagccactacatcaacagatcgtgagatctcaactacgagcctggaggtgaagctgtttcaggagtcgcaaggggtggatggcagtgacagaaaagctcagaacatatataatgatacagaagatgttgtgggacttagttacgcgggacttccaggtgatacagtgaaagaaagggtatatgcccagaatgtaggcagtaaggatatgtatctcaggatcacgataaataaggcatggtttgacaatcaggggaataaagtgtttgatctgggaaaggatgctttagagggagaatctgaaaattctgccaaagaaattgatatattcaaaggctccgttgaggattggttttttacagaggatgccgaatacggtgaatatatttattgttattataaaagagttttggaacccggagaaaaaacgcctgatgtaatgacgggatttagtattctgaacggtgcgtccggaacaactaattctactaataatagtaaccattattcaggtttggcctcacatatctcttttgatgtagatgcgatacagacaactgctggtgatgatgccatactcgctgagtggggtatgaaagcgacaatagatgcaaacggcaatataacgaaaatagaagagcagtaaggaggacgaatatgatgaaaaagaatgtatttacagttgctctggcagctctattagtcctcggaacagcaactactgccatggcagcagatgaggttataacttttaaaggggatgcagcaaaatttgtaacggaacaaggggcaggaacagaagaaggttttacaaatatggagcctgcggaaaccagaacccaaacaataaccttaaagaatgatgattatcagcagatgaaattttatctaaggacagaactcctgtctaatatagctgacgaaggtaagaataagaagcaggcaatttatacagttgatctttcaaagaatggagaaaacttttttgcggctgtaattggcagtgagcaaaacgcatctctcggaaaagaattcctggtatctgaaccgggcagtgagcaggataataatatattgcttgcttcactgaaaaaaggcgaaagcgtagatgtggaaatcgcaattacattggatggggattccacaggcaacgattatcaggaaaaggatggtcagattcagcttattgtcagtgtggaaaaggatgaaggcacccctggtaaaataagaacgacagttactaacacgaaaacagtcacaggggcaggaaagacaataacaaagattgtcaagaccggagatgagtttccggtggaggcattgcttgctgtggcagggattagtcttgtaggtattattctggcaatggcaaaacggaaaaagaaagtagaggaatagattatgatgagaacagtgaataaactgaaaaacagaataaagttattgctctcagttagcgtgctcgctgtgatggtttgctctgctgttcctgtttatgctgaaggcagaagttatgatgtggtatttaaggcgggttcccatggtacacttgaaacaagtgatgaaaaaggtttatcaagtataacgtttaagcaggcatatggagagcccactaaggctggtgacgttggaattaaggaagaggacggctattattttacggagtggagccccgaggtggaggataccgttacaaagagaacggtatatgtagctcagtatgcaaggctggttgattctgtaatgtataaagtgaattatgtagatgctgatggttcatcggtagcagcgcccaaatttcaggagtgtaatgtgggggattccaggacggaaagggctgtgacagttgcgggatatacagttgatgaaaatgtaaaaactgctgttattagcgacggtaacgtagaaataacatttacatacacagcaaatggtccagaagttgagactgtgacagagacgaatacggtcacggtgccgggacctaccacaacaaatgtggtaacccaaaccggcacacctggcaccacaacgactccaggaaccgcaacaacacctggcaccaccacaaccccggaggccacaaccccagaaacaacaccaaccgaggaaccgggtacaacgacgattccggaggaggaagttcctctggcagaaaatcctgcaggcggagaggataatgaagaacaggataccacaaccatcgaagacgaagaagtgcctttggcggataaagaattaaagaaagataattccaaatggatctattctgcaatcgcgggcggaggtgtcctcgtattaggtgcagctgcattgattcttgcgcggcgcagaaagatgtaaaagtaaagttaactttatgaaaaaagctcgtcgacaaggtctggtatctgataccggaccttgttttttcgcaaatttatacacttagtatatccaaaactgcataaaatgtaccgaaaactgcctgagcagactggaaaacctctaaggtttttgttatactgtagtacagaacaatgacgaaaagaattagagcacagagaagcagggtcaggtggggaataagaagatggatgataattacattttaaaagttcaaatgtttggtgaatttcttgtcagcggaagggatggaagtctggatgacgataaaattcgatccgagatgatgactaagctgctggcttatattttctgccaccggcgtaagaaggtgactgtcatggaattggcagaagctctttggcacgatgacaaaagtgacaatcctgcgggtgcattaaagaacttgatgtaccgtgtacgaaatataatgaaaaaggaatggggagagctggattttatattgacaggaagagggacttacagctggaacccagaggtgcctgtatggatagacgcagaggaatttgaacgcctctgcagacaggcgaaagccgggggcagctgcgaggaaaagattgaaggtctgcttcaggcggttaagctttaccgagggccgtttcttcctaaactcagcggagaatactgggcagcatctctttctacctattatcattctttgtatcttacatctgtaaaagacctggctgctcttttggaagaaaacagccgttttgaagagatgggggcggtctgccagaaggcgatacagcttgatgctttggatgaagagctgcactgctgttttataaaagccttaatccgccagaacaagcagaatcttgccctggaacattatcagaagacggtagacttgctgtatgataatcttggggtcaggccttccagagaactccgggaggtctatgaggaactattaaagcagaaacattcacaggaacttgatttgggcaatatccaggatgaattaaagtctgaggatgacggcagcggagcgtttctgtgcgagtatggtgtatttaagaagtcataccatctggaacagcgcagagccagcaggctggggcttcctgtgtacatttctctgattaccgtatatccgtctattgatgtacaggaagacagtgaggcatatctgaaactgatcaatacggggatgagtgtgatggaaacggtacttatatcttctctcaggaatggggatgttatatcgagatacagcggtaatcagtttattgtaatgcttcccaactgccagtatgattcatcccaaatgatcatgaagcgaatacaggacaaattttataccagagataaaaaacttaaagttaagattcagtacagtttggatgaaattgatttaaacagagatcgggttgaacgataaagcagggaggcggatgtgtggaaaagtatctaggtggatttccggtgaatagtatccgcgtatgtgtggatgaacaggaaaaagatgagattcagggaacgatatgtggtgttggactggaacaagaacttccgttttataatatgacaaatcttatactggtaattgaggaggccctgaacaggatagggactcctcaggcgtaccaaaaagtgagaacttttcacgaggagaaggcgggcagaagcagttcgggcttctgtggaaatcccaggcgctacaaagaagcctctgaaatacatgccagggaaggcagtattaaaacgttagatatagtagtggcttccagacagcataccagtatgcaggggattgtaaagaatatagagggaaaagttgtcggtgaatttaacagcgatttggatttgataaagcttatagctgatgcatagattgtttcaggcggcacttcctgaggcagatgattgcagaaacttaaattaggacagaaaagagatgatgatgatggaaacagaaaagcagaacaatgaaatatggaaagttcgtcttttcggacgatttgaagtttccagtcagaatggcattctggatgatgagaagattcgatctgagatggtaactaaactgctgtcttatattttctgtcatagaaaaaggaatattacgattcaggaactgggggatgctctgtggcatgatgacggaagcgataaccctgcgggagcgttgaaaaatctaatgtaccgcctgcgcactattatgaaaaaggagtggggcaggtccgattttatagttaccgggagaggtacctatacctggaatccggagttacatatagaaattgatgcggagaaatttgaaaaactatgcaaaaatgctcccagggaagagaacgcagacgatgagattgcagatctggaagaagcagtgcgtctgtacagagggacctttcttcctaagctgaacggtgaatattgggtggcatctctggctacctattatcactctatgtttttgactgcggtgaagcgtctggcggggctgctggaggaacacagcagatatgatgagatgtcccagatctgcagcagatccattgaactagatgccctggacgaagaactgcactgctggctgattaaggcattgattggacagaataagcagaacctcgccatcgaacactatcagaaaacggtggatcttctctacgataacctgggagtaagaccttcggaggaactcagaggcgtatatgaaacccttttaaaacagaagcatgaacaggagctggatttgagcaagatacaaaaagaattgaaatcagatgatgacggcagaggggcttttttgtgtgagtatggagtttttaaaaagtcatatcatctggagataaggcgggcgggtcgcttggggatgtctatctacctgtccctgattaccctttatccctccatagatgtaaaaaaggatagtgctgcctatactaatattattaataagggaatggatatcatgcagcaggtgctcctgggctcactgcggacgggggatgtaatttccagatacagcagtacacagtttattattatgctgcccacctgtcagtatgagacggctatgatggtaatggagcggattcagaaccggttttattcctctgatgaaaagacaaagattaagctgcagtacagtgtggacgaaatagacttgagcaagctgtaaacggtatagaaacatgggctatgggaagagaatgttatcagtcacataacgttctcttttttgcttaaaaaaaatctgaaaacctggtgtttgtgaccaatgtgtgacttgaaattggtatagtacagttgtaaaacttaaaaagcagctttatgcctgcaacatgaaggtaacgaaatagaatgcttaaggtacatatttcgattttaaataaaggaataggaaaggggaacgttatgagagcagataagaagattatgagatatatcgcggggcttttatgtatggtgctgttagtcaccacgatatttcctcaggtgacagtgaatgcttctgcagagcagggcgtcggggataccgaaaaggtggagaatgaagatacggggaacgctgaagaggaacaacaggagaaagaaccctctgccaatccggaacagacagccggggaattaatttcagatgctcccgctgtatatccgctcaataatgatgctgctgacgttaacgacgagccgcttgtttctgagtacatgtacgaagacgacgatatgctcgtgaaggcagagctcaccaatcccagtgcgattccgcagggggcagagcttcagattcgttcgattgttgcagaggatgaaacacaaaaagacagatattataacatttccggattcttgacacagaaggcaaaagaggaacagtttgttttggatggttttttggcatatgaattgtatttcctctacaacggtcaggagatagtacccgctgacggagaggtaaatgtatccataacatataagaatgaaatcgttccggatgcttacaagaattcccagcaggatggaaaagaagtaaaattatatcagctgcagaaggatgcatcgcaggaagagaccattcttcttgcagacatggcggataatatgacgggattcacccagacagaaaacgggggtgtggatgaactcggttttactatgaacagctatcttccttttatggtcacctggaaacaggaacatcaattggatgttgtgcccgaagacagtggggataacagccaggggacagacgaggaaaccggggaagtgcccgcagagggtcagaccgttacttatgaatataaagatgagaccatacaggcgactgctgttgcagaaaaaggagttcttcccgatggcgttgagttacaggtgaagcctatcgaaaaaggagaagaaaatcctgatgcaatagggagtattcaggaagagatgcagcagaacgggctggtgattggcgacgtggctgcctatgacattaaatttgtgcaggacggagaggaagtggagcccagccaggaggttaagattcagattagctttgtggaaggcctgaagctggaggggagcaaagattattacttctatcatgtgaaagatgacggaagtgtacaggataaggatgcttctttaaagataaatgaagatgagacgatcaccggaattgatttcacttctgatgaattctccgagtatgacattgtgaaaacccaggcggttgaagatgggattgagacaattgtgaatgatgataccggtaaaagctatacggctgttggttccgtgaaaagcaacaccaatgaaggtgttgtggtagataaaacggcaaaagccaatactacaccggatggaaagaaagacggaacgtacaccattgatttaagtgcatatgctacaggtgttgtaacgcttacaggggcaacagatattgttcttgtactggaccaatccggaagtatggatgatcccataggggtgacaacgaagatttatactcctcagtatcgtgatattagttttcaaaaagagtactatataaaagacggcggggaatacaagaaagtgaatgcatatggcagctatggggactattattggactgacaatgggagacgccgaataaccccggcttcctatgaaggagctgaaaatccaaacaagaatatttatgttttttatacccttgaagaaaaatcccagacaaagatggaggtactgaaagattctgttaatgcatttattgatatggttaaagaagatgctgctgcccagaatctgaaccataagattgctattgttggatatgcttccgaaagtggttatggagacaatacagaagtattatccgtgtcgggaaacaattccagcggctatttgaatgatcggtatgtgtctgcaggtgtcaagtatggatatgcaacaaatgcaacttacaggaacgcacttcaggatgtgacagtggcagaggatgcccagatgctggataaagccgtggcggtgctggcgaccaacggagccaccaggtcggacttgggaatggatatggcgcaaaaagtatttgcgaataatccaatcgaagacggggagagaaaccgggtagttgtaatgtttaccgacggtgtgcccacaaccagttctagttttagcaacactgttgcaggtagtgcggttgaaaccagtaatgagataaagaatacccagggggctaccgtgtacactatcggtgttgcttcacagtcagagcctctgaatcctggtgtgaatcctgtcaccaatatggataaatatatgaattatgtatcctccaattacccgaatgcgaaagcgacttatgacagaaggggggatataaccggatttgagcctggcagcggcggagattacactgcgaattactatgcaagcgccggtgacgcggaagctcttcaggcaatatttgataatattgcccatgaggtaggcaagtccaacacgactcttaatgaaaagtcaaagatcgtagattatatctcggattatttttcaatggagggtctggagtataagatttatgaatcctcttatctgggcaacggccagtgggggccggaagtagaaaatacagccttagagaattctaataatgttgttatcaacaagtcggacggaagtgtttccgtagagggatttgactacagtcagaattatatactggagaaagatcccaaaacgggcaaaccttcagggaaaaaactgattataaagctgacggtgaaagcaaaggatggatttatagggggaaatgaagtgcctaccaatgattctgcttatattgcagatcagaagggcaaaatagtcaaagactttccggttcctgccgtagatgttccgctgcagtatgatttcctgacgcaggatcaaagtatttatatcacccagcagtggtcagatgtgaaagctttcctgcagggatatgagggaaatgcccttccttatcagatagaaggaaaaacttattacgtcagcggtatcaacaatgactatgcagatgtgctgtacacagtaaagcagggcgacaaagtaatcggcacttataaagtgaaagcgggcagcgacactggagcctggataaaagagccttccattgacaccacaggtttaaccggtgcggagaaatttacaatttccgcagagattactcctgcctatgacggtgaagaggaaggaatctctacagaagccaaggaagccacgcttcatattttcaaacccgaagttaccagtacagatacgactatctatctcggagagacgactaatctggcagaaaggattactggtgtaaattgggactgcaaggaagaaaatgctcctcagccccaggctggtgccccggatttgtcctatgaatataccggtgtgaatggcgcagcggaagtaaaagacccggcgaaatacggcccggaaaaagatgcagatattaagctgaaagtaacagcaaacggcaaggatatcacgaagcatacgacgtttgcaaataccagttctacccatgagggagcaaaggatcataactttacggtttatgtaaagcctgccatccttcagtttaccaaggaggataccagcggaaatccattggagggagcggaatttgaactgtatgacggcgaagagctgatagcaaaggcagcttccgcagctgacggtgttgtcaagtttgaaaaattggccgcaggcagctatactctaaaggaaactaaggcgcccaaaggatatatccgtggggatagtatctggcgtgtagaagtaaagcaaggtgtggccaccatatatggttccaacgataaacctttggatactattatgaactacagcgcagacggttctattgaaaagaataagtctgttaatgtacagagctgggatgacagaacatataccatcaggctggatgcctcctctattatttctaaagaagagggcggcggaaagacgcccattgatgtagtcttggttttggatgtttcaggcagtatggcatgggacagctacacattacagcacagtctgacggtaactgaaaaaaatcttcaggagttggataaagacacaatttaccagataaaaattaattcattttggtacaatgtggaatataaaaattctgcgtggagatacagatatggttctgtaagtaacaattcatataagttaatagataattttaaaaatcagagtcttgacttctatactacaacgaccagaatagatgctatgaaggaggctgcaattaactttattcagcagcttcaggagagatctccggaaagcaatgtgggaatcgtcgcattcagtagcagtgtgaatgaaacctggacgaaagatttaaccagtgtcacagatggttctctcataaccacgattaacagtatgagagcaaacggaggaacacagccctcaaaaggactgaaaagagcaggaacaattctggaaaacgcatcaaatgcaaagcatgttgtactgctgacagacggcgaaccagatggagagtctgaaacagcaggtaaaaatgcggcgacagaattaaagggtaaggagattacgattcacaccatcggatttgccctggacaacgatacaaaccgcttccttagagaggatatagccagcgagattaatggaactcccagtgcttatacggcggataatgcgacggaattgattaatgcattcaaatttattctggattccactcaagttggcattacaattgaaggggcagtgataagggattacattgatcctaggttcgaacttttgaatgtagtggacggcaaggtggaaggcggaacggtgggcaccgatgagcatggtacttatgtggaatgggagaccagcatcctgccgaagacagatgaaggtgaaccaggctggcaaaaaacattagttgtaaaagcaaaggatacctatattggaggcaataatgtagtaaccaatggtctggagtcggggattacaatcaatggaggccaaaataacccatttgatcagccgacagttaatgttaaagtcagattcgatatcggcagtgcagaagatactatgttctatggtgataacatagccagcttcctgacggacgaagtggtgaacggtatatttaatccttcagaagtaaaatataaggattctgtatttacagacctcagtccggaagactttaccatgacctggtacaatgaaaaggaccaggaggtatcccttgaggatatcagaaacagcgaagaggaagggacatattatctgaaagttacctatagcagctatggcggtgcaagcagcacagaaagtaaaaatcacaccggaggctatgaggttacacctgagaatgctactatgaccggaacctataaagtgcatgtggtgaaggggcagatccagcttactaagatcatagaccagaagtatacccaggttcagaaaaccaattctgaacaaagctttattttccgggtagacagaagagccgaagaggatttggctagcgatattctggacacttattatgtagtgatccgctttgatgccaacggcaatgtggtatcaggtacggatactatctcaggattgaagaaaggattctatacggtaacagagcagacagaatggtcaagtaaatacaataaggacttggtgactgtctgggacaattacagcgatacaaaatacgcgggagccgtgtcgggagtacttcctatcggaaaactgctgaatgacggaaaaacaaatgaaaacggccagtatgatttttacggcacagaagatgacacctatgctaaatatgcggtaaaccataaagctgaggtggaatataacaacaaaatcaaggaagattggaactggttaagtgatgttgcgtcagcggtgaatgcatttattaagtagaaatgctcaggaataagtggtaatataagtgcaaggaggaaagagacattgatgaaaagagtatacaagtgggtgacgacaatattgctcattgtacttatagcctttgtggcggtactatttgtacccagagtgttagggctgaagccgttagcggttttaagcggaagtatggaaccaacctatcacgtgggaagccttgtatatatcagcaaggtttccccggaagatgtagaagtgggagaccctataacatttaacattggagaggatacgattgttacgcaccgggtgattgaggtggatcaggataaccaatgttttaagacaaagggagatgccaacaatacagaggacggaggaacggtagcttactcggctgtaataggaaaaccggtcttctctattccctatatgggatatatagcggttcatgccagcacaaggacgggaaccatacttttaatcacattgatactggttgttttgattttaacatttttgcctgactggctgatgaaggaagacaaagatggggatggaggtgaatcatgaaaaagcttagtaaaaaagccaggataataacggctgcagcgggctcagctctggtactcatctgtgtgataggagtcacattagcccttctgaagacgaagtcggatcaggcggtaaatgactttcagggtgccacggttaatatcggtgtgctggaaggaaatgatgtgtacgagaacggcgacaacataaacggggaattcaagaggatagatacgagtaaggacaaaacagtagcaaaagtggttcgtatccaaaatatagattccaaagatttccctaccagtgacacttttgtgagagttcgtctggtgccgatcttccgatacgatgacggtacttcctacgaagggcaggtatgtccccagtctgtggaaccggataagctgaaatacacctacggggaaggatgggcagataagtggatcgttacgggaacctcagtgacatcgcccacggattttgacacatactactattataaatccgccattgccccgggaacggcaacagatcccctgataacggcagttacctatacaggtgatgttccgaaagacgcacatctggagattcaggtgctggccgagggaatatcttcgaaacagagagattctgtaatttctgcctggacgggagtcagagtggatgaagaaggcttgctgattaatgagtaatatagaaccaataaagcaaaagacagcagtgacaagtataaccatttgtcactgctgtcttttgctttatgcccaggaaaagctttcacctgtaatattcttcctttttgtgaccggagtgtgacttgatgctggcataatatagccataagatggttgaaaggaaccaaccggaccagtaacaaaaaacaaaaataaaaatagcagcatgtgaccgagatgtgacttgcaaagtgcataataagtttataaagtgaaaagcactccggaagagaggaatgtggaatgataaaagagaataagaagaggttgagatttctaatcgttttatctttagtagtaaccttgggaataggagtaacgctggcattgctaaaggacattacagagacaaaaaagaatacgttttcttctaataagaagatagccctactccttagggagcccagctgggacggatatgaatttgccgataagtcgacaacaaatggccagagtgctaagccgggacttacagaggaagaacggaacaagctgggagttgagaaagcagcccgctacgtacccggagaaaatattccaaagaatcctcaggtaaaaaacaatggggatgcagattcagggattccggtatatgcggcaatcaaagtgcagttcatggatgagacagatacacaggttacctatcaacagttcatgagcaggtatctggattcggcaggaattagctttgacactgcacattgggaggaaatagaaactcaaaatgcagataagctttttatttacagagacattttgcagcctggtgaggatactgcggaacatcccttatttacagaagtgcctataagcttagagctttcacctgatggaaaaaccggattgctcccgggatttaatataaccattacagcttatgcaattcagtctgattatgtagaggatcccaaaggggaaatgctaaaatttgtaagcgggatcacagaataaggtatcaaaaagaaaatttcttttaaaaaataaaaatatgaagtgaaaattggaggataagattatggcaaacaagaaaagattagctacaacggttggagcaatggctcttacagcagtattggcaattggcgggacattggcttatttatcacaggtaacagagactaagaagaatatgtttaccggaagtgacaacttgaaaacaaccattacagagaccgagtggaagggcggagaagactatacaccaggtaaggctatcgcaaagaacccggtaatcacaaacctggctgattcaagcacttcaatctatgcaggcgtgaagattcagttctatgatcacaataataaaccaatcagctataatacgttcgcagagaaatatgctacggtacagtacaaagatgcaacaggcgcatttaaagatggatttaatccggcgtgggtagtagattctacaacggcagacagtacaaaaggacttttcctgaactacaatacagagatagcaccgggcaatcctaccgcggcagtatttgatcaggttacagttaactatggaattaaaaaagagtggaatcaggaaagcaaagttacaactgtataccctgtaaagacggatggaaatggaaattatgtgacagatgaaaagggaaactatgtacctgatacatcaaaaccgattgagtctaccactgaagtaggggatacatctgtaacatttgttgacagcaatggtgtagtagttgatgcatttgtattacctcagttccagattgatgtgactggttatgctgtacagtccgcagatttaacacttgagaagggcgttattgaactgaaggcattagcaggacttaacaaataatagttaatgaatagaagatgaaggagagccgatatgaataataaaaaattaagaaaatcattaattgcactgggattagttgcaattgtaggaattggtggtacattagcatacttcagccagaagacagaggaaaaacagaacgtatttaccatgggcgcaggccttaccggagaactgaaggagcctgcatgggataacgtagacttcggcggcggttcagcagggattgaagaaggtaaattaggagagaaattagcggaaaactttactcctggcttagagattcctaaggatcctgcaattaaaaatactacagttacagatgagggcaaagctgcagacgcatgggtagctatcaagattaaatatgtaggcgctgacagagaaacagcaactacatacgcagcattagataagtttatcaatgttacttttggggataagtggacactgaatgatgacaagacaattgcttactacaatgttaaactgccggcaggagaaaccacacaggatctgttctctaaagtagtgattgacaacaaagcaattactcagtcacagtatgataatgaacagtacaaccaaagcctttactccgatgtggatccggcatccaactacattatgagtaacttcaatattgagcttcagggttatctggtacagacagatggtttcaacaatgctcaggcagcaatggcagcagcttatccggatgaattttaattgtaactgaaggaaagtaaatttaaaagataaggaaaggtgaatgataatatgatgaacagaaaaaaactcacagcagttgttgcatcagttgccctggttgctgtactgggaatcggcggaaccttgatgtactttacggatagagatgaaaaaacaaatgttatcaaaatgggaaaagtagacggaagcctggaggaaaatacagacgatcccaatgctgaaaagggtgatgatggtattacttatacagatcctacaaacccaggagatacattaagcaagataccaactgtccagattacaacagattcagaagatgcatatgtaagggtcaaaattgatatttcaggcttaagcgatattacaaatgcagagggtacagagtataaagacattttggaagctggtctgaatattggttctcagtggacaaagggcagtggtggatattactattataatgtaaagctttctaataaagaaggcggacagaaggtaacggatcctttattcacagaggttaagattcctgccgactggggcaatgaagttgcagaaaaggaagttaggattaacttacaggcagagttgattcaagcagataattttgaggatggtgtaggcaacattttacgtaacgatgatggaaagatcaatgggtgggctaacacaggagacattgaggcagcaaactaatttttgattttattcatgaacaaaagctacatacccccaaccgactactgtcggttgggggcataatcaagaaaaagcagaaagggaatgaaaaatgggtgaagaacacaaaactcaagtgattgaggcggcggggcagagtttcatcgtcgaaataaaatgcgttcagaatcacacctggcagggtgttgtaacctgggttgaacaaaaaaagaaagttccttttcgaagtgctttagaattaatcaagttattagactctgcagtgggatctgaacatttagaaactatggaggaatggaaatgatgggaagagtacttaatattctcggcactgtcattatattaggaattatcctgatttccattccttttttggtgcctaaaattatgggctatcacgtgtatgatgtgattagcggcagcatggaaccagaatatcccaaagggtgtctggttctggtaaaacccctggaacctgctcaggtgcaggagggtgatgtcattaccttccaggtgagcagtgcctctgatgcggtgaccacgcaccgggtggtgggaatagatgaggacaaacagattttccgcaccaagggtgatgccaacagcggacaggacgcagagccggtggcctttcagcggttggtgggaaaggttatgtttaagattcctcttttgggaaattatgccagatttatccgttccacaccgggaactgtgacgggaatcttcctatttataatagccattttgctttggtatctgggatctatccttacacccgggaagccaaaaagagaatgagtgtatacgcaggtaaaggaatggaactcctttggcagagaatgcaggggttaaagtttaacataagggacgttgttgcttaagcaaagacaacgtccccgattgtttttcttgcaaaacaatgaataaaaaaggaaaattagatgttgacaggctgaaaagtttgtgatacagtaaaaaatgcactattatggcaagatatgcctactcgtaataatgccgtgggctgatgttataataaatttaaaatatacaaggggtgacacgtcaatggagaaaaacagaatccgtccaatagcaaccggaaagagcatgcgtatgagctaccagcgacaaaaagaagtgctggaaatgcccaacctaatcgaagtgcagaaggattcctaccagtggtttctggacgaaggtttaaaagaagtctttgaagatatatctccaatcgcagattacagcggaaaattgagcctggaatttgttgactttactttgtgcgaagatgaaataaagtacacgatcgaagaatgtaaggaacgcgatgccacttatgcggctcctttaaaagtcagagtcagattgtacaacaaagaaaatgatgagattaacgagcacgagatcttcatgggcgatctgcccttaatgactgctaccggcactttcgttatcaatggtgctgagcgagttatcgtaagccagctggtgcgttctcccggtatttattatgctatcgcacatgataaagtgggtaagaagctgtattcctctaccgttattccgaaccgtggtgcgtggcttgaatatgaaacagactccaatgacgtgttttatgtacgtgtagacagaaccagaaaagttcccattactgttcttatcagagccttgggatatggtaccaacgcagagattgtagagcttttcggggaagagcctaagattctggccagctttacaaaggatacctctgagagctaccaggaaggtctgctggaattatataagaaaatccgtccgggcgagcctcttgctgtagagagcgcagagagcctgatcatgagtatgttctttgatccgagaagatacgatctggcaaaggttggacgctataaatttaataaaaagctgatgctgaagaatagaatcacaggccaggtgctggctgaggatgtggttgatgcaagtactggggagattcttgcggaggccggcatggaggttactaagtccatggcagacgacatccagaatgctgctgtgccttatgtatggattcagggagaggaacgcaatattaaggtcctgtccaacatgatggtagacattactaactttgtggatgtgaagcccagagaggtgggtgtcacagaattagtatattacccatgcctgaaaaaaattctggaagaaaatgagaatatcgaggatattaaggaagctgtaaggagaaatatccacgaactcattccaaagcatattacaaaggaagacattctggcttccattaactataacatgcatctggagtacggtcttggaaatgacgatgatatcgaccatctgggcaaccgccgaattcgagcggttggagagcttctccagaatcagtaccgcattggtctttccagactggaaagagtggtaagggaaagaatgacgacacaggatattgaggggatctctcctcagtccctgattaatattaagccggtaactgcggcagtgaaggaattcttcggttcctcccagctgtcccagtttatggatcagaacaaccctctgggtgagctgactcacaagagacgtctctccgcgctgggccccgggggtctgtccagagacagggccggattcgaggtgcgtgacgtacattactcccattacggaagaatgtgccccattgagacgcctgaaggtcctaacatcggtttgatcaactctctggcttcctatgcccgtatcaatgaatatggatttgtagaggcaccatacagaaaggttgataaatcggatccgaagaatccccgggttacagacgaagtaatctatatgacggcggatgaagaagataattaccatgtagcacaggccaatgagcttttggatgagaatggatactttgtgcataagaacgtatccggccgctacatggatgagacacaggagtatgagcgtcagatgtttgactacatggacgtatctcctaagatggtgttctccgtggctactgccctcattccattccttcagaatgacgatgccaaccgtgcgctgatgggctctaacatgcagcgtcaggctgtgccccttttgataacagaatcccctgtagtgggaacaggtatggagtcgaaggctgccgtagactccggtgtctgtgtagttgcaagaaaatccggtgttgtggagagatccacatccaaggaaattacaataaaaaatgacgacggaaccaaggatgtataccgtctgaccaaattcctgagaagtaatcagagtaactgctacaaccagaaacctatcgtctttaaaggagacagggtagaggagggcgaggtaattgcagacggaccctccacctcagaaggagaactggcattgggcaagaatccgctgatcggatttatgacctgggagggctacaattacgaggatgcggttctgttaagcgagcgtctggtgcaggacgatgtctatacgtctgtgcacattgaagaatatgaagcagaatccagagatactaagctgggaccggaagagattacaagagatgttcccggcgtgggtgacgatgccttaaaggatctggacgaaagaggtattatccgtatcggagcagaggtgcgtgcaggggatatactggtaggtaaggttactcctaagggagagactgaactaacagctgaagaaagactgctccgggcgattttcggtgagaaagcccgtgaagtccgtgatacttccttaaaagtacctcacggtgaatatggtattgttgtagatgccaaggtatttaccagggagaacggagatgaattgtctcccggcgtaaaccaggcagtccgtatctatattgcccagaagagaaagatttctgttggtgataagatggccggacgtcacggcaacaagggtgttgtctcccgtgtgctgcctgtggaagatatgccgtttctgccaaacggccgtcctctggatatcgtactgaatcctttgggtgtgccttcccgtatgaatatcggacaggtgctggagattcacttaagccttgcggccaaagcccttggatttaatattgccactcctgtattcgacggcgccaatgagaacgacattatggacacactggatctggcgaatgattatgtcaatatggaatgggaagactttgagaagaagcataaagaagaactgcttcccgaagttttggattacctgtatgagaacagggatcacagagagctttggaagggagttcccatctccagagacggtaaagtaaggcttcgtgacggcaggacgggagagtattttgacagcccggttactattggacacatgcattatctgaaactgcatcacctggtagacgataagattcatgcccgctctaccggcccgtactctctggtaacacagcagcctctgggcggtaaggcgcagttcggcggacagcgttttggagagatggaggtttgggctttggaagcctatggtgcttcttatacccttcaggaaatcctgacggtgaaatcggatgatgttattggccgtgtgaagacttacgaagcgattatcaaaggtgacaatattcctgaacctggaattcctgaatctttcaaggttctcttaaaagaactccagtccttaggcctggatgtgaaggtgctgagagaagaccagacagaagtagagattatggaaacaattgattatggtgaaacagatttgcattctatcatcgagggcgacaaaagagaaaagccgaatgaggacttcggtgactttggcttcagccagcaagaattcgaaggagaagagctcgtagacgtggaagaaacggacgacgaagaagatgatgcattcttagacctggaagaaactcttgacgatgaggagtaggaggaaaaccataaatgccagaaacaacaaataaagaagtttaccagccaatgaccttcgatgccataaaaattggattggcatctcctgaaaaaatcagagattggtcaagaggcgaagttaaaaaaccagaaaccattaattatagaaccctgaaaccggaaaaagacggccttttctgtgaaagaatcttcggaccaagcaaggactgggaatgtcactgcggaaaatataagaagattcgttacaaaggcgtagtctgtgaccgatgcggtgttgaggtgacaaaagccagcgttcgtagagagcgcatgggccatattgaactggctgctccggtatcacacatctggtattttaaagggattccgtccagaatgggactgattctggacttgtctccaagaacactggaaaaggttctgtactttgccaactatattgtcctggatccggccaattcggatctgcagtacaaacaggttctcacagaaaaggaatatcaggatgccagagaaaaatggggctatgatttccgtgtggggatgggggcagaatctattaaggaactgctggaagccattgatctggagaaagagtctgcagaactaaaacgcggtctgaaagagtctacggggcagaagcgtgcacgtatcgtaaaacgcctggaggtagtggaggctttccgcgaatccggaaaccgtcccgagtggatgattatgactgtaatccctgtcattcctccggatctgcgtcctatggtacagctggacggcggacgttttgcgacatctgacttgaatgatttgtacagacgtatcattaacagaaataatcgtctgaagagactgttggagctgggcgctccggatattattgtccggaatgaaaagagaatgcttcaggaggctgtggatgcactgatagacaacggccgccggggccgtcctgtgacaggacctggaaaccgtgccttgaaatctctgtctgacatgctgaagggtaaatccggacgtttccgtcagaacttgctgggcaagcgtgtagactactcgggacgttccgttattgtagtaggaccggagctgaagatttaccagtgcggcctgccgaaagaaatggccattgagctgtttaaacctttcgttatgaaggaactggtagcaaacggtacctcccataacattaagaatgcgaaaaaaatggttgagaaactccagcctgaggtatgggatgtgctggaagaggtgattaaagagcatccggttatgctgaaccgtgctcctacccttcatagactgggaattcaggcattcgagcccattctggtagaaggtaaagctattaagctgcatcctctggtatgtactgcttttaatgctgactttgacggagaccagatggctgtgcatcttcccttatctgtggaagcccaggcagagtgccgtttcctccttctctcacccaataacctgctgaagccttctgacggcggtcctgtggctgtgccttcacaggatatggtgcttggtatttactatctgacccaggagagaccgggctacaaaggcgagggaatgcactttaaaaatgtaaatgaggcaattctggcatacgaaaaccaggtaatcaccctccagtccaggatagttgtgcgctgtacaaaaaccatgccggacggaagtatattgagcggcaatgtagaatccacactgggccgttttctgttcaatgaaattctgccccaggatctgggctttgtagacagaagcgtagagggcaatgagcttctattggaggttgacttccatgtgggcaaaaagggcctgaagcagattctggagaaagttattaatacccatggagctacgaagacagcggaagtactggatgatatcaaggctatgggttacaaatattcaacaagggctgccatgacggtatcgatttccgatatgaccgtgccgccggaaaaaccagagctcattcagaatgctcaggatactgtggatatgattaccaagaactataagcgtggtctgatcacagaggaggagcgatacaaggaagttgttgagacctggaagaataccgatgataagcttacaagagcactgctggatggtctggataagtataacaacatctatatgatggctgactccggcgcccgtggttctgataaacagatcaagcagctggcaggtatgcgtggattgatggcggatacaaccggtcataccattgagcttcctattaagtcgaatttccgtgaaggtctggacgtactggaatactttatgtccgcccacggagcccgtaaaggtctgtccgacactgcccttcgtaccgctgactcgggataccttaccagacgtctggttgatgtatctcaggatttgattatccgtgaggttgactgctgcgcggataagaacgagatccccggcatgtgggtaaaagcgtttatggacggtaaagaagagattgaaagccttcaggaacgtattaccggaagattctcctgcgagaccattaagaatgccaagggtgaggttattgttaaggcaaaccacatgattactcccaagcgtgcggccagagttatgaaagaaggcataaacgcccagggcaaaccatttgactccgttaagatccgtacgattcttacctgtaagtcacacattggagtgtgcgctaagtgctacggtgccaatatggcaaccggtgaggcagttcaggtaggtgagtctgtaggtatcatcgcggcacagtccatcggtgagccaggtacacagctgaccatgcgtaccttccataccggcggtgtggccggcggagatatcacacagggtcttccccgtgtggaggagctttttgaggcaagaaagcccaagggtctcgctattattacagagatcaagggtgttgccaatattaaagacaccaagaaaaaacgagaaattactgtaacagataatgaagaaggtaattccaaaacctatctgattccttatggttccagaatcaagatccaggacggccagtatctggaggccggcgatgagctgacagaaggtagcgttaaccctcacgatattctgaaaatcaagggggtacgtgccgtacaggattatatgattcaggaagttcagagagtatatcgtctgcagggtgtagagattaacgataagcacattgaagttattgttcgccagatgctgaaaaagattcgcattgaaaataatggagatacagatttcttgcccggaactctggtagatgtattagactacgaagaaaaaaatgaggaactggcagctgaaggcaaagagccggcaaccggcctgcaggtgatgctgggtatcacaaaggcatcactggcaacgaattccttcttgtctgcagcgtccttccaggagacaacaaaggttctgacagaggccgccattaagggtaaggtagacccattgattggtttgaaggaaaacgtaatcataggtaagctgattcctgccggcaccggtatgaagcgttataaagacgtgaagctggatacggatatggaagagaatgatgagttgtctttcgaagaagactttgaactggatatggatgaaattgacgatgagaccgccgctgatatgtttatggacgaagcggaagaagatatgactgaagatgaagaaatgttagtttctgaagacacagaagagtaatgatcaaagtgtaaagggcgggaattcctggggaattcccgctttttttgtcgcagatgcaaaagtgcgggggcacagatgcataaaaaggaaatagatgagtggatatcaattattagcaggcggggccgtggctctcattaatgtcttaacttccctgtatctttttgcctatatagaaaattacagggggaaccgcaggtggggcagatgggtgactggaggctatatcgctttgtttcagattttctgcaatcagggaacagtgacgcatgtaagcttggccgcagctttgattatcgcagatactgttattatgtttttgctcctcacggcatttacctgggatggattccggaattttttgttatataaattctacgatgggatctcaagcgtcgtgtactgggttctctgtatgctttttttgacagtgaccggcagaaatgtcttgatttttacagattcaggagacgtatctcccctgtggggcgcgggtgcggtgtttttgctgctttccttggggacagtggttatctgctgtaagaacagagtgttttataaaataaaaattaaggtgatcgaggtattattcctgctccaggtttttatgattgccatagtgatagcactggatatgaagagtatgcagcgcaacctgattatggatgtgattttttttggtatgtgtacgcagatcctttatacctatctggggttcctctggagcaggagggcagggaagaggcgagagaatgaaatccttcaggccagccttagggagcagtcccgctactatcaggaatactatcagtcccaggaatctataaaaagaatgcgccatgacctggccaatcatgctgcggtgattgaccgcatggaaaaagctggggagtatgacaaggcatctgcataccgggaacagctggtgcaggcccttgacagggcagtagagtctgtgaagcaggtgtccctggcccagaaaaaagagaagcctgcagtcagcagatgggaacgaccggtcagggatatatccctgattgcctgtcttctcagttttggcattctggtcgccttaattgtgagcgggcgctacctgatatggatctgtatttttacgcttgtgatgctttttttagccagtgtttatgtcatgcttttttaccatgagaagcagatagaaagggaaaatgcctggctcagacagcagcttatgcactgggaagaaggtcatcaggaatttgaagagctggcagagcaggtgcgcagtgtcaggaggtggctgcagcagaggagagagggatatgaaagggaattgctggaacagtgcgacgcggccatagatgagggaatcacgggcagctttccggtggatgccatgctttattccaaattggagctgtgcagaaagtatcgtattctgacagatatacaggtccttcttccggagaaatctcagatggaggatatacatacagtggggcttctgggcaatcttctggacaatgccatagaggcctgcaggaaagggcctgcaggttccgggtacatttatctgagaaccgcggtgcaggctaatttctgggaaataagaattgacaattatacagagaatgagggatattcctctatagagaatcattttgccactacaaaggaagacaaagaaaatcatgggcttggaatgaagattgtgcgcagtatggtggagaggtacgatggcgtacttcaggttgaggagaaggaccatatgttttctgtaacagtaatggttaagatatattagaggggatgaaagtgtgaagaaatttgcgatttgtgatgatgatgctgaggtgaccgaaggattaaaagagaaggtcatggagatatatgagggtgaggcccagattgctgcatttcagcgtgcagaagaccttattcaatggctgagagaagagcgcggagatgtcatcgctgtttttttagatatagagctgaacaacgaaaatgggatagacaccgcaaagaaaatagaagatttttgtgcggagattcctattatttttataacaggatacattaaatatgtacaggatatattccgggtccgccccgtggcgctgcttttgaagcctgtggaagagcatcggctgagagatgctctcaggaggtgtgaggaagtcagggaaaaggaaaagaagaatatggtgacgcttcatattaaaggggttctccatcagctggacagcagagacattgtctatgtggaaagtgataagagaatcctgtacatatacgagagaaatcagatctataaagtatatatgaagctggacgagctggaagctatggaacttccgggctttcttagatgccataagagttatatggttaatatgaattatattaaatatctctctgcagagggcattatcttaaaatcaggcaaaaaggtacccgtgagcagatcgaagtatcaggagtcgaaggaagcctttatgaagtactttaaactataagaaattttgtctaaagtgacggagaaaaacatgatataattacagcacagacagaaggtaggtaaacgttacaggcagaaaggagttgtctactatgagatgtcccaagaagtggaataaaaagctaattcttccggtagggatcgggggtacctgtatggtgctggtaattgtactgggagtgatttggggggtgaatcagacaaaggccggccaccttcaggaaaagctggatctgggaaataaatatctagatgagatggattacgatcaggccaaagccgcattcgacgatgctgcagatattgatcctttcaatgcagatgcttatgtgggtctgaccaaggcctgccgggggctgaaggatgaggaaggtgctaaaaagatgattaccatagcgatggaaaagattggtgatctgcccgaggaggaaagagcggcagccggagagatactctatgcggaggcggaaactatatacgcggagacagaggatctcagaggggcagatgctttaaagcagtgggcggatgacaataagattcctgttaaaccgtcaaagccgtcagacacccgggatgaggagacagataaggataagcctgcacaagaggctggaacagagactaaaccatcaaagcctcaggcagaggacccccatcaggtttacatggactatgtaaaaaataccctaagcactcaattcccattcagtgagatgaagggagccactgctgaataccctaatcttgaggccctgggaacacaggaagaagtaaataactttaccacatatacagaggagtaccagaagaccctgaaggctcaggggggaatcctgggaattgcctatgcagatatggataacgacggggcagatgagatggcagtgctctatacccgtcagattccggaagaataccagtataactggctgcaggctgatatctacaaggcagtggatggtcaggtgagaaagctggagggagaggaactgagagttccctgcaggaataccttccccagtgaggggaacaaggaaaaggtgcaggcgttcttaaaggtgaacagcggggtaacctaccttggatttatcagccatacatatggcgtgtacggaacaagcggagagcgtacggccttcacccaattccttctggggacggtagagaatggaaaagtggtctgcagactgcacctggaggaggatacgggagtgtacctgagggatatactggcagagaaaagggagaaggcagccgctgcttctgatgaccagggagcctatgtacaggggaaacttcttgtggatatgatgagtgacggcagcacaaatgtaaaagacagactttaccaggaactctccccttacggattttcctcttcttggatggacagttatttcgaagagatgcagaggaaaaagctggctgcggaaaatgggatactggcatctctggaagaggtaaaatcacccaatccctttgaggagaagctctcaggaaaggagaaggataccacggaccttgcgtctgtaacaacagaggttaccggatacagtcaggcgcggccggcatttgcggtagttcagtttgacagcacggatgagacaaaactggcagagaacaaagagaagtatggctttgataaatcggttacagcgggcgcaccggctgcaggaacactgaagaagcagtatcaggaggagattgcgcagattgagagcaaatgcagtgaaatatacacggatcttcagacgaacagttactccaatgcagagatggggcagaagtgcacagagatctataatttatgggacggcgaactgaacaaagtttatcaggagcttatgaaccatataagccctcaggaacaggaggccttaaagtctgaagagaaggcctggattgagagtaaagaagatgccgtggaggcgcttcgggaggaatatcagggaggcaccatactggtaactgaggtaccgggcaagatggcccagatgacaaaagagagagtatatgaactggcagacaggctgccggaaacataagggaagaagaaattatgctggaacgtatttcagacacatatgacataattggaaagatcggcgccgggaagggcggcacgatctataaagcctatcacaagcgcctgcaaaaggaggttgtgcttaaaaagatcaacagcagtattcttgggttcagagacagcagaatcgaggcggatattctgaaaaatctgcgtcactcctgtattccccaggtgttagattttctggagatagacggggatgtgtacactgtgatggattttattcccggtcattcctttcaggaatatctggataaaggacggacattttcccagaagcaggtagcagagtgggctgtgcagatatgctctaccttaagctatcttcacagcaggaagccccccatagtgcacagcgacattaagccggccaatattatgctcacccctgagggaaatatctgtctgattgactttaacgtatcagcagtgctgaacggacagggcaccagagtgtatggctacagtccaggctatgcagccccggagctcattgccgctgcaaagcacaaccgctctgtgaacgaaaaaagtcaataccgcaccgtagacgcccgtgcggacatctacagcctgggagcaacgctctatcaccttatgacaggaaggatccctgccagacggccgggcgatatcagagacatcagggagtacagagcacctcggggagaagcccaggggccgggagagcggcgcggacaagacaatgtctcaggtacgtctgtgacaatcagcgaggtatttgccggcataataatgaaatgcctggaggcaaggccggaccggcggtttcagagcgcttcagagcttcttttggccattcagggtatgggaaggcaggataaaaggtatcagaggctggttttccgccaaagagtaatctacggaggcctgggggcagcctttttgctgtgcggaggccttacggtcagaggaaatatccagatggagcaggataaagcgcgccaatatgaaggctatataaaagaggcatcccacagcattgaggaagcagactttgagaattttgaaacgttctatcaaaaagcacttaaggtatttccccaccagattgacgcttattatcagaaagcagtggccctgaatgcccagggagagtatgaggaaaatattttgtatattacaggcacaattcttacagacagcaggcttctggaacaggatgagatgctgggcaatgtgtactatctgctggggaacgcctatgaacacacagagaaatatcccgatgcggcaagaagctacgaaaaggcgctccgtgcggatagccgcaacagtgactattatcgggattatgccatcgcactagccaaagagggagatctggacgctgcagggaaggcgttggatgaggcagaggagaacggggcagacagcggggatctgatttatgtgaagggcgagattgcgtttcagaaagaggattatacagcggcgaaagagtattttgtgcagtgtctggaagcagcgtcggatgactatacccgtatgcgcgccggcgtgatggcctgccgggccattgacagcgcaggaaaaaacgaggaagggtgccgggagaaaattgctttgctggaagagacaaaggcaagtttgcctgccggggagcaggtggcggtgctggaagggctggctcaggcatatatggacatggcagagtacagccaggataacacatatttagaaaaggcggcagatacgctgctgagtatcagagacaatggctgggggacatacactacagatgagaacctggcagccttataccgtcagcagaaggaatttgacctggcggaggaggaactggaacgcatgctggaaacatacggggaagactaccgcatctataaaaaccttgcgtttttggaggccgatcggcagggagaaaaagaaaacagccagagaagctaccagaagtttggccagtactatgagaaggcggaggaattataccgaaagcagctggacaataatgagacggatcctcagatgaagcgcctggaggaactccaccagcaggcggtgaagggcggatggataacctgagagggatcgggaaagcggggtatatatggcaattaccacaggaacgattatgttttacggcgggatagcgggaatggcgctatgccttctgggtacggttgtactgcagaagatatttaaaagacagagaaaaagactgctggaggatatccggcaggaagagtgaataaaagcaccggagcagtggggcgtattatccccggctccggtgtttttattataggtataatgaattactccgtaaaatactgatccacgccgtcggctataccttctgccatctgatactgcatagcttcgtccgccatcctggcgtcatcctccggattagacataaatcccatctcgacgatggtaacagggattgtacaccagttgatgccgctcatattatccacttccatgaccgaacgctttttgaatcccgtggctgcacaatagcagtccagtacatctccggagagcttctgagaggcagcagcgatattactgacatagggatttccggaggtgggcgccatggtgagcgcgccgttcacggaactgtcgtcagaaccgttggcatgaatccgcagaaaaatctccgcgccggactcattggcaatctgggctctctctgcgttgctgatattcacgtcgttggtttcccgtatcatgattacctcataccctcttgcctgaagctcgtctctgagtttcagggaaacctgaagattcagctcatactcctgcaggccagatacacttccgcttgttccggacgcgacctttgccttggtttcgccggctcccggtccgatgggctcctgctcgctgttcccctgggcctgatgcccggcatcaatcgccacgatatgaccgtttccctcaggctgagggggactcgccggctgttcctggggagccggtgtctggggctcgggtgtctcctgggtctgggaaggtgtttcttcggatacttcaggaggggtggctgttatggtttcgggttcttcttccttctttggggtttccggtatatcggcattctcctgggcgtctgacagggcatcggcgtcctcgttctccgaaagaagtgtattcccggcatcggcatttttgctgcgggaatccctgctgcttccggtaagctttggaataagaagaaagagaacaactgccagcactgcaattcccagcactgcacagagaataactacatttttaggccttttctgtggcgattgatccataggtacctccaattaaacgttttgtatttgtgcttcttattttatagtattcaggcgcgagcgtcaacaatcttgggaagatcaggccttctaaagaaaattttacaagaaattccttgacacgacttgccgcaaaagctataatacataagtgcgcacggaattacacgctagtcgtgcgcccaaaaaaggtttttattcacaggaataacaaccagcagccacaatattccaaagaatttaggaagaaaataatacaggaggtgaattggaatgccaacatttaatcagttagtaagaaaaggaagacagacatctgtaaagaagtctactgcaccggcacttcagaagagcttcaactctttaaagaagaaatccacaaacatgtcatcaccacaaaaaagaggtgtatgtacagcagttaagacagctacccctaagaagcctaactcagcgcttagaaaaatcgccagagtacgtctttccaacggtattgaagtaacaagctatatcccaggagaaggtcataacttacaggagcatagcgttgttctgatccgtggcggcagggtaaaggatttaccaggtaccagatatcatatcgtacgtggaacccttgacactgcaggcgttgctaatagaagacaggcacgttctaaatacggtgctaagagaccaaaacagaaataataaaccgaaggccagaaaagcactggtattacggactaactaattaaacaaatcaatagaatcacaaaatgctatcatttgtaccgggattccagaagaacctagcggtggctgcgggtttatcgatagagaatttaccgagtgcgaacacatagtaggtgtgcatacgccatgtgagtacctatgatttaatcaaaagcagatgaattctgctatatcaatggaatgattaaggagggaagtaacgtgccacgtaaaggacatactcaaaaaagagacgttttggcagatcctctgtacaacaacaaggtagttaccaaacttatcaacaacattatgttagacggtaagaagggtgtagctcagaagattgtatacggagcattcgctaagattgaagcaaaagctgaaaaaccagcattagaagtatttgaagaagctatgaacaatatcatgcctgtacttgaggtaaaggcaagacgtatcggtggagctacctaccaggtacctatcgaagtaagacctgagagacgtcaggcgttagcacttcgttggattacattgtactcccgcaaaagaggagaaaagacaatggaagatagactggctaatgagcttttagatgctatgaacaatacaggagcatctgtaaagaagaaagaagacatgcataagatggcagaagctaataaggcatttgctcattatagattctaaaggaggaaaatccattggctggaagagaatatccattagagagaaccagaaacattggtattatggcccacattgatgcgggtaagaccactctgacagagcgtatcttatattataccggtgttaactataaaattggagatacacacgaaggtactgctaccatggactggatggaacaggagcaggaaaggggtatcacaatcacttcagccgctacaacttgccactggactttacaggaaaactgtaagactaagccgggtgctctggaacaccgtatcaatattattgatactccgggacacgttgactttacagtagaagttgagcgttcactccgtgtattagacggcgctgtcggtgtcttctgtgcaaagggtggtgttgaacctcagtctgaaaacgtttggcgtcaggctgatacctataacgtacccagaatggcattcatcaataagatggatattctgggagctgatttctacaatgcagtagatcagattaagacaagattaggtaaaaacgcaatctgtcttcagctgccaatcggcaaagaggacgatttccagggaatcattgacctgtttgagatgaaagcttatatctataacgatgagaagggcgaagatatctcaatcacagacattcccgaagatatgaaggatgatgcagaactgtatcatacagaattagttgaaaaaatctgtgagctggacgacgacctgatgatggaatacctggaaggggaagagccatcggtagaaagcctgaaagcggttctgagaaaaggaacctgcgaatgtgcctgtattccggtttgctgcggtactgcttacagaaacaagggtgttcagaaactgctggacgcaatccttgagtttatgccggctcctacagacatacctgcaatcaagggtattgacctggatggaaacgagatcgagagacattcttccgatgacgaaccattctccgcgctggcattcaagattatgacagacccattcgttggtaagctggcatacttcagagtatattccggttctatgaattccggttcttacgtattaaatgctactaagaataagaaagaacgtgttggccgtatccttcagatgcatgccaataagagagctgagttagataaagtatttgcaggagatattgcagccgctatcggtttcaaattcacaactactggcgatactatatgtgatgaccagcatcccgtaattcttgagtctatggaattccccgaaccagttatcgagctggcaatcgagcctaagacaaaagcaggacagggtaaattgggagaggctcttgcaaaacttgctgaggaagatccaaccttccgtgcacacacagatcaggagacaggacagacaatcatcgccggtatgggtgagcttcacctggaaatcatcgtggacagacttctgcgagagttcaaagtggaagcaaacgtaggtgctcctcaggttgcttacaaagaaaccttcactaaatctgcggatgttgacagcaaatacgcaaaacagtccggtggacgcggacagtacggacactgtaaagttagattcgagcctatggatgccaacggtgaagaactgtacaagtttgatactgcggttgtgggcggtgccattccgaaggaatacatccctgcagtaggcgagggtatcgaggaagctatgaaggccggatctctgggaggtttccctgttgtcggtattcatgctaccgtgtacgacggttcttaccatgaagttgactccagtgaaatggcattccacattgccggttctctggcatttaaggaagcgatgcagaaagccgctcccgtactgctggagcctattatgagagtcgaggttactactccggaagactacatgggtgatgttatcggtgatatcaactcccgtcgtggccgcatcgagggtatggacgacatcggcggcggcaagatgattcgtggattcgttccgctggctgagatgttcggctattctacagacttgcgttccagaacacagggacgaggcaactactccatgttctttgacagatatgagccagtaccgaagtctgtacaggaaaaggttatttctgcaatagggaaataatcccgttttatcctataacttgttaaattttccttgcaaatatccctgttttgcaatataatcaaggatagcaggttcagtagtaaaatagcgaaaaaaaacaatttgcccagaggggcgcatatgtattaaggaggacattcaaaatggctaaagctaaatttgaaagaaacaaaccgcattgtaacattggtaccatcggacacgttgaccatggtaaaacaaccttaacagctgctattacaaaaactcttcacgaaagattaggtacaggtcaggctgttgctttcgaaaatatcgataaagctcccgaagaaagagaacgtggaatcactatctctacagctcacgttgagtatgagacagaaaacagacattacgcacacgttgactgcccaggacatgctgactacgttaagaacatgatcactggtgctgctcagatggacggtgctatcttagttgttgctgctacagacggtgttatggctcagacaaaagagcacatcctgttatcccgtcaggtaggtgtaccatatatcgttgtattcatgaacaaatgtgatatggtagacgacgaagaattacttgagttagtagacatggagatccgtgagttactgaacgagtacgaattcccaggtgatgatactcctatcatccagggttccgctttaaaagctctggaagatcctcagagcgaatggggagataagatccttgagttaatgaaagctgttgacgaatgggttccagatcctcagagagatacagacaagccatttatcatgcctgtagaggacgtattctctatcacaggacgtggtacagttgctacaggtagagtagaagctggtactctgcatgtatctgaagaagttgaaatcgttggtatcaaagaagagacacgtaaagtagttgtaacaggaatcgaaatgttccgtaaattacttgacgaggctcaggctggtgataacatcggtgcgctgcttcgtggtgttcagagaactgaaatcgaaagaggacaggttctcgcaaaaccaggttccatcaaatgccatacaaaattcaccgctcaggtttacgttctgacaaaagatgaaggtggacgtcatactcctttcttcaacaactacagacctcagttctacttcagaacaactgacgttacaggtgttattgaattaccagctggtacagaaatgtgcatgcctggcgataacgtagagatgacaatcgaactgatccacccaatcgctatggatcagggtcttacatttgctatccgtgaaggcggacgtactgtaggatcaggacgtgttgctcagattattgagtaattattaattattcgtaaaatcaaggcttccgaggatttcctcgggagcctttttgtaaatctgaaaaccaagggattcctttgtacccatgcagggagcaccttttatatagtctgcaaaattgtatttcagctctcccatagagacgcacctcagatggacttgcttcttttagcaaagaggtgtatactatatctaattgtttgttcgtgaagaaagagaaaagatattgtggtgcagctatgagaaatcattgcacaggcttttaaaaagtggtcatatctatttttcccaatcggatagggctgttttatgaaaagaaatgcagacagtatattaaataaaagaaactataattgcagtctgtcaaaatggctgacagagcaaggaaaacaaaaaagaaaagaggtattatttgaatcaaaaagaaaaacaattgaaaatgagcaaagaggtaaagatcattcccctgggaggcctggataagataggcatgaacattacggctattgaatatggggaaaccatcgttgtggtagactgcgggatttcttttccggatgatgacatgctggggattgacaaggtgattccggatgtgacatatctggttcagaaccgggagaaagtgaagggttttgttattacccacggacacgaggaccatataggggctctgccttatattttgccgcagattaacgtacctgtctatgccaccaggcttactatgggattgattgagcataagctggaggaagcgaagcttctgaagaagacgaagcgcaaggtggtgaagcagggcggctgtgtgaatcttggggaaatgcgcatagaatttgtcaagacaaatcatagtatagcaggcgcagcagcactggctatctatacgcccgcgggtatgatattccacaccggggactttaaggtggattatacccccctgtttggggaagctattgatctgcagcgtatgggtatcctcggcaaaaaaggagtattggcagtgatgtgtgacagcacaaatgccatgcgtcccgggtttaccccatctgaaacgaaggtggcaaaaacatttgatatgctgttctcagagaataagggaaaccgaattattgtggcaacctttgcttctaatgttgaccgggtgcagcagattatgaatacggcatataaatttggaagaaaagttatcctgcagggccggagcatggagacagtgattaagattgctgaggagcttggatatgtaacggttcctgaaaacaccctgatagaagtggagcagatgaaccggtatccggatgagaaactggtgtttatcaccaccggaagccagggagaggcaatggcggcactttcccgcatggcagattccacacacaaaaaggtagtgataaagccaaacgatgtcattattttcagctctacgcctatacccggcaatgaaaaagcggtatccagagtagtaaatgaactggctcgtaaaggcgcaaatgttatattccaggacacccatgtctcaggacatgcctgccaggaagagataaagcttatctattcactcttaaaaccacagtatgcaattcctgtccacggtgagtacaggcatctgcttgcaggggccaatgtggcgcaggacctgggaatcgaaaaggatcatgtgtttgtactggatgccggagatgttctggaattgtcccaggagaggggaagagttacctcaaaagtacaggcagggggcatctatgtagacggccttggagtgggcgatgtgggcaatattgttctccgtgaccggcagagtctgtccgaggatgggatcattatcgtaaccatgagctttgaaaaaggaaccaacagactcctggcaggcccggatatcatatccagaggctttgtgtatatcagggaatcagaagaattaattcgggagatgagaaaagtcgccctgaaggccatcgagaaatgcgagggcaggaagagcagagactgggggtatataaagtcagagatcagagacgggatggatcactatctttggaagaagattaagaggagtcccatggtgctgccggttattatggaagtttaacatggaggccaattatggcatataatgaagatgtggtgaaagaacaggcaaaacgatatgacagtttttatttgtatgatgagagtcaaattgtcgcgcgagctcaagacttaaaagagcatttccctaatatcctgttcctttactccattaaatgtaattctaatgcaaatgtccttcgaagtgttttttcacagggatttggcgcagatgctgcaagcgcaggagaagtccgcaaagctcttgccgctggtgtgaaaaaagaaaatatctattactctgctccgggaaaatcaatggaagatattgagaccgcaatcaaatcttcggtccttattgcagacagtattgacgaaatcaaaagaattcagatggtagcagaacgaataaatttcatagccgaaattggtttgcgaatcaacccgagtttttctttttatgggggaaatgggatatcttctaaatttggaattgatgaagaacaggcaatcgcttttataaaagaatatgatttttctaatattaagattgcgggtattcatgtacatctgcgcggtcaggaattgaacgctgatattcttgcggcatattatgaaagtgttctccaagtagcaaagcgtatacaagatgttaactccactcatctttcgtttgttaatatggggtcgggtatgggcattccttacgctgctgaagatgtccctttggatatagacaaactaagtaagtcggttaatactgtgttagacacatttcgcaattcgtttcccgatacaaagattattattgaaacaggccgctatattgttggaaaagcgggcgtatatgtaacgaaagtagcagaccgaaaagtgtcctatgggaaaacatacattcttttgaaaaataccctgaacggctttagtcgtccctcgttagcccgtttggttgcacactattcattggatcaatctccgaaaggaagcgagccgctattcaccagcacagccgcctttcaatttaatgcattgagccaaaagaaaccatctgaacaagttgatttggttggaaatctttgtacggcgacagatgtaattgcagaggatattacaatgccgtacttagaatgtggtgatattgtagttataacaaatgctggtgcgtatgcagccgtgttgtcacccatgcaattttccactcagtctcagccagtagaattgttcttggatcttaatgggaaagttgaaggatgacaggatttcctatttcgaagaagctgcaaagccaggcggggtttcaacggtcaggatgaacggcgcttaaagcgccgttcatcctgaccgttgaagcctcgcccattaatttatatggaacttctcatatgcaaacctacaatttctttccaataacctcctcatacatagcaatcagattctccggcggaacatttgctacgatattatgtatggtattaaacacataccccccatttttgccgaggatatcaattcgctccctcacttctctgcgtacttcttccggtgttccgaagggcagtgtcttctgtgtatcaacgccccctccccagaaggtaaacttatctccatatttctctttgatggtcctagcgtccattccctttgctgagagctgcaggggattcaggcagtcgaggcccatatctgcgaaatcatccaggaaactggagacggcgccgcaggtgtggtagaaggtcttccagcttgtgtgctggtgcacccagtcattgatttctttataaaaaggtttgtataactcgcggaaggtttccaggctcatcataccggccatttggttaccgaaatctgttccggagatccagactacctggatccggtcgcccacagcctgacggtatatttcaaggtttttgagcataatatctgtctggtagcggaatacggccttgatgtaatccgggtacatggaatgggccataagccagtcatccacccgccggatgccctttggatgcttgatccccggtcccggaacgacggctgcatcccccagggcgccgcctcctatcatacctacgatcccgtagtctgtattctcgtataattcaatggatttcttttcccagtaacgggcttcttcatcggataccacagagaagtcatctttaaaatcttccagtggagtcaaatcctcttcttccagatcccagtcaaatttttctcttggaacacagtcaaaaaaggtcccccctttgggaagaatggcgctgtactcggcactggtgtccccctgaggatagacaaagagctttccggtctcatcctgatcgtaggtaaaaccgccccccatccatacgggtgtgccgtcatccatctcccatttcttccagttatcgtttttatacccgaaataattggtggtgttaaacagaccaactacatccacacccaaaagatccaacagatcctgttccacctcacccagaagctgtccgggctcgatgattttcagccgatgttcgtccaggtgaagggctttccgcagctgatacagggagctggcattgatgcctgtctggctggtagcccccagatccaggggaagcctgtctggtgtctgatgatttaaagttgcaattaatcgttctctggaagtcatatgcatttctccttttttcatgttgttgtatggaatatttactgcaattaactggtgttgttgagtcttattataaaggggagggaaaaaaagtcattatagaaatttgcctattaattgcaaaaaattgctcttaataataatagattcaaattgaccgcatccgtggtgtcaaatataataataagtagagagtacagaaagaatgaaaggcggtgaagacaatgctggcccgggaagaaaaagtgaaaagaaagtcggaatactttgtttatacacccagcacgcaggcaagggaaatgtttttttatcctctggtgaccggtcacttcttttatgaaaaggattattttctgcacagggaaagctttgacagttttttgattatgtatatcagaaaagggagctgcacggtatgttctgactcggggatatacagggcggaggaggggcaggtggttttgctggactgctaccagtcccatgcctattattccgaggaggagtgggaggtgctgtggctccactttgacggccctatgagcagaaaatattttgagatgattgcggagaaggaatgcagtgtgataacccttcccaatccggtaaagttcgaggcggaactaaaccgcctgtaccagcagttccagaaaggggagaacattaaggagattgtaatgtccggctatattatgaagcttctcacggagctggttctggctcaggaagccgctttcgggaattcccagtattcaggtgtgattgaggagagcatggcttatatcagagagcatctgtgtgaggagggcttatctctggaacggctctcctctaatgtgaatctcagtctgtattatttcaccaggctttttaaaagagagacaggatttaccccccatgaatatatcattttatccagaatcaataatgcaaagttccttctgtggagcactcagattccggtgaaagagatctgctttcagtgcgggttttacagtgaaagtgcgttctgtaatacctttaagaaatgggaaggcatgactccgagacaatttcggatgaaaaataaaaccagcaaagggtgagaaggaagggaccatatgatacatataaaggaatggatgaaaagagtcaaaaaagagttctaccggaagaatattgcggagagaattgttatggttatcgccgcgctcatgattgttaccaccatctgctttgtcagcagtgtgtttattattctgcagaaacagctggtagctactacttctacctcggcaaagaaggatctggagatggtactggagaagatggatatgttttttcagggagtggaaaatgatgcggtttccgtattggtgggggagagctgccagaccctgctggagaattccggtcagtttttacagggagatattgtaaaacagcatgaaaaatatgtactcattcagcaggtgattaacagctatatcgggcagaagtccagctacagtgccattacattttatgatttaaagggaaactactatgccaatgaggatttggtggaagaagaggagtaccttcaaaatcagatggcccgggtagaaaagttcatcgagtcagacaagaagtcagagctcttagaactgcataaaagtccctggaaacagtcgaaggcaaagtcatatgcggattgtatcagctatgtgagaaaggtttacagtatgggaagcggcaggctgattggagtagtggagatagagattcccaacagagaactgagccggctctatgagacggtgatgagcgatgggataaagatgtattttgagagggataatcatattattctggcgggagatgaagcgctgctgtaccagtctctggaggaccggaggtggtataaggctgccggtgcacaaagcccggatgaggacggatttacaatggcccaggataaaggcgcctggtattttatgaaggaatacaaggggcagaactggaccgcggtcagtgaggtttcaaaatctatttatctcacaagtgtgacagtgtatgcagtgaccatggtgctgcttggagttgccgtgtttctgggcagtctggtattggtaaaattccttgtaaaatccattacccggccgctcagccagattacccagaccattgttgaaattggaaagggtgattaccataagcgggtggcagtaaaggacgggggagagttggggacactggccttcgagtttaaccggatggtggataagacagagattctgctgctggaaattgttgagaaggaagaggacaaaagagaatccgagctctctctgatccagatgcagatgacgccccactttttctacaatattctggaaagtatctgcgggctgattgtgatggacgaaaagaagcttgccattcataccattcagcttctgtcaggattttaccggggggtattgaacaagggaaaggagattatcacggtaaaacaggagctggatattgcctcaaattatctggagatcatgaaggtctgttatcccggaaagtttacctatgaggttacctgtcagccagagctggagaatcattttatctgtaagcttacccttcagcctattctggaaaatgccattcaccacgggtttcaggagatgagcgggggcggactgctgagcatacgcgtctttgccggtgagcgggggatggttatcgaggtagaggataatgggatgggaatggatgataagacaagaaaaagtattctttccggggagagcagagggttcagaatggagagcttcgggcttcgcaataccgatgaaagaataaagctgtattttggaagccggtacgggctcaagatactgcctctggcgcagggaacaaaaatcagaattttcctgcccacaagggaggattatacaagttaacgctgtggccgaagaagggatgaaaaagaagatgtttaaagtgattattgtggacgatgagatgctgatacgaaagagaatacggctgggatttgactggaatgcactgggctatgaggtagaggaggacgtggggagcggaggggaggccctcagacttatcacagagcgtacatatgacctggcaattgttgatattgccatgcccggaatgaacgggattgagctggtgaagagactgcgggaagaaaacctgccgattcatattatcttccttacagggcacagtgattttgcctatgcgcagcaggcaattaaatacggggtatatgactatattctgaagccggtgaatgaagaagaattcaccagaatgctggaaaaattaagggacaagctggaggaggaaaagagggagcagcagtttttggaaaatctttcactgggacagagcgatgccaggcttattatggaggcaaagtttttcagcgatatttttcagtatggaatacaggaagagatcgcagatgagattgccgtccaggcaggtgaggcgggagtggatacggaggcagagtattctctctctgttttccgcattcagctctatacacaggagaacctgccgctgctggcacagagccagaagctctatgaggccggccggcgtgtgatggataagggggaggactttaccgtactttttgatctctttaataattactgtattctgttcaaagaatggtctgtcagggacagcagggaaggggttaaggaggcaatggaacaggtgcgggaattactggagcaggatctggagacggtcatccggtgcggaatcagcagccgtaaaaaagggatccggcagctggtaaacggatacaaggaagctgtctgtgcgctgaacaataccaaagcattccgggaaaagaccatgagctatgaagaagtgggcaaaagaggagacagccattaccgggtttccgcggcaaagattaaagaggtacagaactgtgtggggaagaatgatcccatgggctgcgaacggatgattcggaatatctttgacgagatgatcgggagacaatgcaactacgagtgtatctccatgaatgccaacagactgcttcttgggatctccgaggcgtgcattgcctcgggacttgagatacgcaggtttatgggagaatacaaaagcctggaggctgcgtttgaatatctgatgactttgggagaagtaaaagagtggttctgcagcatggttaaagcattgattgaaagcaaaagcactcaggcagcagccggaaaaaatatgcccatcgtgggaaaagcatgcgaatatatgcagcatcactgcagtgatgtagaactgactcaggcagaggtggctgaacgggtaggagtcactcctgcctatttaagcggtatctttaaaaaagccatgggagtgtccatgatgcagtatttatctatggtccgtctggaaaaagccagggaattgctgctgggaaaagaaattgaagtgagagaggcggcagccctggtgggatacagcgatgaatattatttcagccgctgttttaaaaaatattatggggtatcaccttcacaggtgaaacatttaaagtcaaggggcagtgagaatagtaccacctaaaaaatttacaaaaacagaaaaaagcagcacatggagttttaggggaaatccctgtatgataaacctatgctaagtactgcagtacaaaaaagttaatgtttcaaaaaaagaacagggagggtattatgcaaaagaaaattatcagcgttttattggcatccgttttagcagtatctgttctcagcggctgtgggaattccggtggggagtccaaggacagcagtaagaaatcggaggaaactgcaaaagcagaagatggaaaggtaaaagtcaggattcttaccagattcagtaacccggacagtgtgcgtgaaagatatttcatggatatggtagcaaagttccaggaggagaatcaggacattgagctggaggatgtttctatatccgacgaggaatcccatgatactttattcaagacctctgtggcttccggggatcccattgaagtatttaattttctcggttatgcggcaaatatagactatgtaaaaaatggtgtggtgacagatatctcttcacttctggaagaggatcctgcatggacagagaactatattgacgcactctttgcaccggtagactattctgcctatggaatcgaaggtacctacgggcttcctacgtctccctacggtgtctgctgcttctacaacaaggccatttttgatgagctgggaatggaaatgccggaaacctgggaaggaattgaggcggcggctccaaaactgattgaggcaggctatatccccatggccttcggagcaaaggataattatcgtgcaggtcatttcctcacggcactctctatgaaatactatggggatcagttgaagaatgatttgattgacaatgaaaaagcatggaacgatccggagatgcttggactgattgaaaaaatgcaaaaatggcaggcggacgggcttttcggagacaacaaccttgcctatgatgccaacggtgagctggcaaaactggagaataaggaggctgctattatcttcagcggttcctggaatattgcaactattaatgaattttccaataaagatgacattgtctgcaagggattcccgtattttgaggaaaaaccggaatacaaggatgaatggatgggcggaccggatgattttatggccatgacctcccagccgggggatccggactacgacgcaacggttcgtgtgctgaaattctttacctcccaggagtattaccagggactgtatgaggcacaggcaggagcaggaacctatccggttacgttcggggagacgattcaggcagatgctctgaccacagaatttaatgagtactatggaaaggctactaatatgataggggagatcgaacaattctcacctatgacctctctgctggatgtagtgagaacagaagtgacaaccattttctcaggggataaggcaaaggatatcgccgacaggatccagggagaagtagatacctataacgcaagtaattagcagatcttgtacagcatggcgggagaatttctcccgccatattaaaaggaggtgtttcctatgtttggcgtaatgagcaggagaaagaaaatagaggccatactgttaagtctgccggcatttctgctgtattctttcatttttatttatcccatgatctcagtattccggctttcgctctttaagtggaacggaatccccaattctcctctacagtttgtgggcatccaaaattatcttgcgctattcgcagacagaaagttttttaccgcattaaccaatgttggaatttttatcttatcaggatgtatcctgatcctgccggtggcagtatttctggcaactgttgtgcagtctaaattaagaggaaaaagattgctgaagaccagctatttcatgccccaggttatcagccggacggccatcgcccttatgtggtacttcctgctgtatccggaaggcggccccttagctaccctgatacacggacttggctttgacagcgtgaatgtaaacttcctgggcagtcaaacctatgctatctatgccattacggtgattaatgcctggacctatgcgggattcaatatgctgatattctccgcgggtcttacggcgattccggaggatgtttatgaagcggcaagggtggacggagccaaaggctggcagaagcttcgctatataacgatacccatgttaaagagcagttttcagatctttttgctgaactgtgtggtgggttcaatcactacgttcgagatggtatatgttacaacagggggaggacccggaagtgcatcggaggtgttcggtacattgctttataagaatgcttttacttataacaattatggctactctaatgccatgggctcattcctgattattgcctctttcctggcaagcgtactgcttacaggattgttcgcaagaggacagaaagagtaggtgacagcatgaaaaaattaaaagcaggagatattatttaccgtttaattgccatagtattttttcttatctttatttatcctatctattttactgtggtatcatcttttaaaacaaatacagagatatggaataccatgtttgctctgccctcgaagattgagtggagcaactatacatccgctatttttgatgtggggatcctgcgggcagttctgaattcctttattttctcgttcggggcgtgcatggtggtggtggtttttgtaaccatggcagcctatgtggcggcaagaaagctgattcgcttttccggcgccctgcgtctgtactacctgctgggacttatgattcctccgtatgccatgctgattcccattgttaccatgtttacaaactttgggttccgggacaaatactggcctatgattctgctttatgcggccattaacttccccatgagcttttacctcattaccggatacatagaggggatcagcaaagagctggatgaggcggccattgtggacgggtgcagtaccacagggattgtctttcggatcatctttcccatagccagcccggggatttttacgggagcgattatttcgttccttgcggtatataatgagctcatatttgccaatactcttttgacaaatcaggctatgaaaaccatatcagtaaggcttttgggcctgcagggagaaagatttaccagttacggaccaatgtttgcctccattgtgctttccattgtgccgatcctgattatctatctgatattccaggagaaggtagagagcggtatggcggcaggagcagtgaaaggttagaaaggttaggtgaaagtatggtgaagagtaaaggactgcagcatatcggcattcttgttccggacgcggaagctgcagcaaaatggtacattgagaagtcagattttgaaaagaaaggagaattcaccgcccagggaagccgggttatctttgtatattccagggatacaaaagtaatgtgcgagctgatacagcgcccggcggggagtgaagaggccgccgatgttgagaaacatggcggaaggatcgatcatattgcctatgaggcagaggatctggaaaaagagtttgcccatgccaaagaggcagggatggatatcattgaaggcatagtggaagtgccggaattctgggaaaacggattccagtattttctggtgtacggggccggaggtgaaaaggtggagtattgcaaagtgctgtaaaataaaagtttctgaaggatgggaggtttattgatatgaagacaagagttgtaccgctgcagtttgccagcgtggaggacaaggagtttcaccggatattagatgccctgaaggagatttaccgggaggaagtggaatttttggacccggtcagtgtgggggacccggttcctgaggcggatgctgttttatttccggtcttatgggtggaggtgtataaggagatagacatccttctggatacgatccatcttccggtgattgttttgaccaccacggttggcgtatctttgatgtttgactgggaagcagctgcctacatgaaatcaaaggggctgcaggtattcaacccccacagtgtagaattggcaaaaacagtgttccgggcgctggctctgaaacgggaaatgaaacaccagaaatttctgatcttccaggatacgccgggggacgggctgattccggagcagtttaagatcttttactggtggaatgaggaatgtacccgcagcatgcaggagaaattcgggattaccatagtaagaaagtcctacaaggccctgggagagaaggcaaaatccatatctgatgaggatgcgcgccgggaactgaagcggtgggattttcctgaagagatcccctatgagcggccggtgctgggggcgattaagatgtttctggctctgagagaggagaccgatgcagagggggacgttgtgggctgcggtgtaaactgcctcaacgaagcatatttcagcgatactactccttgccttgcatggaaccttctgtatcaggaccggggtattatgtgggtgtgtgagggagatacctcttccctgatgacacagtatctgatgggaaagaccatagacagcgcgatctttaccaccaatatctatcccttcctttccggaatgcctgcgctgtcccacgaaaaaattcaggaattccccgatgtcccggatccggacgatcacgcactgctggtacactgcggttatctgggctgcgtaccacagtgcatgtccagaaagtggaccctgcgcccgccggtacttggctggcattcctgggatttggtaggggaaaatggcgtggcagtggacgcagaggttgagaccggggaccttacattgtgcaagctgcacggagactttgagaaaatctttgtggagaaggctgttttagaggaatacgtccagtatccgggatcggactgccggaacgggggccttatcaaggtggctgacggatatgatatgatggaacggatctgctctcaccatgtgattgtgctgaccgggaagagaagcaatcagatgaaggcagtgggggaggtctttgggatagaagtggatttggggtagagtgacaggggggacggagagagagcccgcgctggggcactgcctgtgcctccgggagggatgcctgtttcccggggacacctccgtcgtgaagagagtctaaggcaaaaccggaatcccctccggagcaccgttcgcatgcccagagaatgctttatgtgcattctctgggcattctctctttttttcggcctggactgccgaaaaaatctcctgcggaaatcccggttttgtctaagactctctaacacttctgcggaatcgtccccgggaaacaggcatccctcccggaggtacaggcagcgccccaacgcggactctctctcctggttatcggaagcattgagttaacctgcccggacctgtatccgccgcccccttctatatctgtccccacgcaattaatctaaacattatatggcttttccaccccaaaatcctcccacggcgcccagggatcctggacaatgaatttgcctccggagatatccaggatttcaccagtaataaaagaggcggcgtcggacgccagaaatactaccggtttggcaacttcctcaggttcccccagtctctgcaagacagaggtatgacagagataatgcagtcctttactttttaaaatactgttttttaccatatcggaggcaatgactccgggagcaactgcatttacccggatgttgtacggggcaagttcagaggccagcattctggtcatagcattgatgccgctctttgttactccgtaggcaccgatcgaagtggtagggactctggaagccagtgagctggtggatataatacttccgccgtgctctttcatatagggaagagcatatttaactgctttccacacggaagacaggttggaagccacaacggaatcccacgcgttgtcctcaagctgtgtcagatagcacatatgactctgggccgcgttgttaaataatacgtcgattctcccataggtactgcctgccttatcaataaagcttttcagctgcctggggtctgtgatatctgcggcagaagcagatacagacaagtgcttttttcgggcctcctccagaaaatttctgattttttcaggggagcgggagcaaacggcaacagaagctccttcttcagcaaactggaaggcagcagcctttccgataccggcagttcctcctgttataacaacaattttattttttaagtgtaggtccatagagtgatgctcctttctgttcttcagaacataatgtgaatagttatttagataaatggaagcgtttccatataaaaggctaaggtacatgtttaaattatcatataatagttgaaaaaacaataaaacaactgcgaatatttttaaaatatgcgatttagacaaaaaaatatatgggagattgtacaaaaatactattgaaaaatgtgaaatgctgtgataatgtacatatatagcaaatggaagcgattccacaaaggagtagatacgtgcagagtaaaatgacaattgaagacatagctgaaaaagccggtgtgggcaaggcaacggtgtctagagtattgaaccataccgggtatgtcagtgaaaaaacaaggaaaaagatagagagagtaatagaaaattgtgattacgtgccctccgcaactgccaggaattttgccaggcaggacagcaacatggtgggagtaattgttcctgaggcacacaatccatattttgctgctgctgtggagggaatttcaggagtgttggaggaaagtgagctgctcttgatcctgtgcaattccaataagaattttaaaaaagaagagagaaagcttcatttactaaaacagcagaagctgaaggggctgattatcactccctctatcaatgacatggatctgaaggaaatcaaggagtacaaggagctgatccattcgttacatatcccggtagtctttatggattccggcctggatttttatgaatgggatctggtatattttgacaacgttgcgggagcttataatgcaacaaaagctatgatccaggagggctgcagagatattggaatcataaccggggatcttaacacaaagacagcccgggatcgataccaaggctatttgagggcattggaggagaacagtattcccgtggaacagaaaaaggtatatcagggagatttcaccacgcagaccgcatacgagatagcgaaaaagatccttcagtcaggggattacccaaaaacattttttaccacaaacaatctgactaccataggttttatcaaagcggtttacgactcaaagctggagctggggaaggatatcaactgcatttcctttgacaagcttgatacctttgaagagctgaagtacagctatattgaacgggatcccatgaagatgggtaacctggcggccaccatgctgatggagcgggtcaaagatccggagctgcctgccagaaaatattatatgccgtccacgattaagattgacataccctgatggacggacaaaagtaattttataatccagataattatctggattataaaaagggaaaacatggaagcgcttccacaaaaggaggagaaagaagcaaatggtaaagaaaatcatgaatgaaccacagaacattgtagatgagatgctggaagggtttgtatttgccaaccaggagatacagtggttcagggagtaccgggtggtgtccctgaaggaaaagaaaaagggaaaagtaggggttatgtctgtggggggaagcgggcatgagccggcccatgcaggatacataggaaaggggatgctggacgctgcggtggcagggaatctgtttgcctctccctctccggatcagatgctgaaagctatggaggacattgatacgggggctggtgtgctggtagtcctgaaaaattattccggggatctgatgaatttttccatagcaaaagaattggcagaagcccagggaatttctgtagaaagtgtagtggtaaaggatgatgttgccgtaccggacagcacatattctacaggcagaaggggaatcgcaggtacggtatttgtacataaaattgccggggcacgggcggcagaaggagctaacctggagcaggtaaagctgtccgcccagaaggctgcggacaatgtaagaagtatgggaatgtctatgagtgcgtgtatcctgccgggactggacaaacccgggttttcactgggagagaacgagattgagataggaatggggattcacggagaacccggaatacagaagtcaggagtaaaaacagcagatgaactggcagaggttcttctggagaaaatcatggaggacttggattaccgttcccgtgaagcagcacttatgattaatggattgggcgggacgcctttgatggaactctatgtactggctgccagtattaaaaaactgctggagcagaagacgataagtacctgccgggtttttgtgggaaattatatgacatccctggagatggcaggctgttccgtctctatgctgaggctggacgatgagctgaagaggctgctgcaggccccgtgcgcttcaccggcgctgacactgcagtaaaggaaggaggagcacatgtttcagatatacaaagaggattacctccggtatcttacaaaggcggccggagtgatacgagagaataaggagtatattacagaattggattccgcaacgggtgacggggatcactggctgaatcttaccattgggtttgaaaaattgttagaaaagtcaaaagagtgggagggcgcaacctaccaggaacttttccggaatatagcgatgactatgatgtccgctatgggaggttcctcaggggttctgtacggcagtgcatatctgaagacggcgggccttctggcgaatagggaaagtatagatcaggaacttctgggggaaatccttcagggatgggcagaggcgatccgttcccgtgggaatgcagaattaggatataagaccatgctggatgcggtatatcctgcagcctctgcttatgctaagggactggaggaaggaaagagcagcgaagaatgtttgagacaaatggcccgggcggcccgggaaggagcagaaagcacgagagatatggaggcagtgaagggcagggccagctacagagaggataaatctgtaggcttcctggatccgggagcagttactatggcgatgcagttagaatgcctggcggactttatactgaaagaggataaagatcccgctgctaaagactgaaggcagatataagattacctggttagtatgccttattgtatcatgacactgatccggagcagtgcagatatggggcagaaaataaatagtaaaaaaagagaggttaaacgtatgaagagaaatttgaaaaaagtaatggccgcagtattgacaatggcgctggtatcctgtccccttaccgcttgctcatcctctgaagattcagggaaggacacagaggctaaaaaagaggaacagaaaaccgaggcaggcagtaaggattctgatgcagagaagaaaacagaagttacagtgggaatcgcctggccgtctctgggaactcaggcatggtcggctatggcagattatctgagatggtatgtggacgaatacaacgagaaaaatgatgtgaaggtaaaactcattgaaactactgccggtgacgatgcggctgcccaggagactcagatccgggatctgctgaaccaggatgtggacgtggtggtatccggcgccattgacacaaccgcaatatggtcatccatcaccgagacacatgacgcagggaaaaagtttatttctttctgccgcagactgaccccgggcgggcctgaggcggactcaaccgttgcaccggacacttacgacaccgcatatgtatctgtggatgctgccattaagaaaatgattgagagcggaattcccgcgaatgaaattaaagtgattcgggtacagggggatttaaaagatcagaatgctatgagatacggagaagggtgcgaggctgcagttaaggataatggggccgcaatcgctgcggatattgagagtaactggtccgtggagacggtaatgaataaactggcgcctacgcttcagtccaacccggatgctaatcttatctttaccccaaatgaagacctgatgcttggagtgcagagtgttctggaaggccttgacaaatggataaaatcaggggaggaaggacatatgtatctggcggcagcagggggctgcgagattgggctgaaaatgattcaggatggatatctggatgctaccggctatgaaaacctgcctgaggtatctaccaataccatagacaatgcagtaaaactggcgcttggagaagagccaggggatttctttgtgaaatcagaagccattacaccggataatattcagcctctgctggataaagactatttctgggtatatgactatgtgaaaaagactgaaaaatagagcaaaagaatgcccccggtgcagccctgggctgcccgggaacctgaaggaggttttaaatgagtatacagaggtactgtgctaaaaagaaaaatgcctttatgaacagaaaggataaaacatttattttagccagcctggcagctggggcagttcttttgctggctattgcgtttgctaaaccaggtttttattcggggaaaaacatatccagtattttaatccagtgcagtgcggtggcaattatggctgcgggccagatctatgtaatggtcagcggagggatagacctttccataccctctgtaatgatgctgtccggctgtataggcgcgctggttatgcgtcagacaaacaatatactgctggggatcttgtctattatggcagtggcagttctggcaggactgttcaatggattatcagtagcaaagctgaaaattaatgcgtttgtggctactatgattactatgctgattgcaaacggactttccctgaaggttacaaaatccagcagtattcctgtgccccaggaattcaccggcctgttcggaaagtattacggccccatacatgccaatattgcggtcatgattgtctgtctgattgtcctgcagtttgttttgaccaaaacagggttcggccgctgtatttatgccataggtaccaatgaaaaaagcgctcaggcatgcgggattaaaacagacaaggttaagattcaggtgtttttaatctctggagtattgtctggaatcgcagcaattgttttaactgccaggattgcatcatcttctctgtcacttgcatcagattctacatctctggatgttattgccgcggcaattgtgggcggcgcaagtataaaaggcggggtgggaaccgcagtgggtgcatttgcaggtgcctttattatcaacggattgtcaaacctgttagtgctctttggcattgactattattcgattcagattataaaaggtatggtattcatctttattacctattttgataccatccgggcaaaagcaaggagggcatagagatggaacgcagagcgtattttgaagcagtaaaattacataaatattttcccggggtacacgcgctgaacgatgtgaccattacagcggataaagggtctgtactgggcatcattggtatcaatggagcaggtaaatctacatttatgaatgctttggccggggaactcgctattgactccggtgaatattatatcggcgggaagaagatagaaatccggaatcagaaggactctgaaaaaagcagaattgcactgatacatcaggaggcggtggtattcaaggatcttacggtggcggagaatgtttttatctataacctgaaggactatacaaaggccggccatctgcagtataaaaaaatgtatgaggatgcatccaggtatctttctatgataggggctcaggtaaacccaagagaactggctaaaaatataacggtgggagaaaagcaaatgatagaaattgccagggcactggtgagagatgcggagatcgtacttttcgatgaacccacttcgtctctgtctctggaggaaaaagaaaacctgttccgaattattaatcagctgaaggaacagcagaagatcgtgatgtatattacccacttcctggatgaagtactgaaaatctgtgacaggacggttgtgatgcgggatggagaggtaacgggagacttccggatcaaggaagtaagcaccagggagctgattactgggattgccggtcatgaagtagagaccgtggtgaatcaggaggacgagaaggaccgggaggaggttctgaaaattgagaatctgaactgctatccggcagttaagaacataaatttctctgtaaaaaagggcgagattctgggactctgggggctgctcggatccggaagaacagagattatacggagtatatttgctctggataagcctgacagcggaacaatttataaaagaaacaaagaaggtaaaatgatccggatcagcgggcataagcttctggaggaatgtgcctatgtgacggaggacagacattatgacgggttatttatgtccatgcctatctggaaaaatatcactatggctaatatcgggaatttttcaaatataaagatggatgtagagaaagaacatgaatactctttaaaaatgattgaggaaatgcagataaagacaccggatgaaaacgtactggtggagacgctgagcggcggaaaccagcagaaggtgatcatggcgagatgcataggaaagaatccggatgtgttttttatagatgagcctaccaggggggtggatgtaaatgcaaaatcttttattcacagaaagatcctggaactggcaaggcagggaggctctgtggtaatggtttcttctgagattgaagaaaacctgaacctgtgtgaccgggtacttatcgtaagaaatggagcaattaccgccgaggtcaggaaaaaagacatcagcaaagagaatctcatggatctctgcctgggaataaaggaggggcaaaatgaataaaagcataaagttaaaaaatctgaagctgacagcccttaaccatgcggtttatattttcggtgttatcacaattatagttttttcttccctgtcggagcattttctgacttctacaaactggattaccatactgagaaactcaacgcttatgctgtcaataggaatcggactaacctttgcactgatcgtaggagagttagatctgtccgtaggcgccaactgcaggttcgccgcgtcagtaagcgccctgcttatggtgaaccacgggtggaatccctatctgtgtatgatcttaatgcctcttttgggaggattcattggtttgataaatggtcttcttgtaaccagagtaaagctgaatgcctggctggtgaccctctctatgaagctggcacttgtggggattgtagtgaagctgaccaatactgtcgccatcaatatgccgcaggaggttctgaacttcagaaacataaagatttttgggctttccagctttatcgtgtttatattggctgtcatgatcctaatgcagatccttttgagatacagtacgtttggaagaaaactggttgctgtgggttccaactattcagcagctgaaaagctgggaatcaatgtaaaaaattacaagctggcagcctttattatcagcggcttcttcgccggactgggcggcatgctgatctctgtaaatctgggaagcattacccgtgaactgggggacggatatgagtttacggcagtatccgctgtggttttgggaggcgtttccctggccgggggtgaggggagcgtatttcccaaggcattcgccggggttcttatcctgacggtaatcgagaatggactgacaatgatgggggcagatatctatctcttccagatcgccaaagcgctgatcatttttgtcatgatgtatattgactctattaaaaataaaatgtagcgggtgacacgatggacagaagaatatggataggcacctgtacagacgaaacggcccccgggggtatctatgtctgtggtttaaacgaagatacaggaaggttacatataagtggagttcagagggaatgcagcaatccggggtttctcgcccggaacagggataaaggatttctgtgcgcagtaaacgagggagcaggaagaaactggatatcggtctaccgggattcaaaggacggacttctccggctggtggatgaaaaagaaataccggggaagggcccctgccatatcagtatgaacagagacgggacacgcatctattatgccaattacgagagcggtgatatcggaatgctgtatctgaatggggagggaaggtttcttccagatacctgcagaattgtgcatcagggaagaagcgtgggggagcggcagaacaggccccatccccacgaagtacatcttctatgggaaccagaaatgctgctggttccggatctgggtacagatgagattgttctttatgacctcagtgggggaatgccccggaaattgtgggaagtaaaggttcacccgggagacggccccaggcatctggccagacatccagggggccgctggctttatctggtctgtgaactagagaacatggtatatgcctttcaatggacaaaggaaaaaaagctgctgcaaatgcagaggctctctctgctgggggacagcaaaaccggagaatatattgcaggggagatagcagtaacctctgacggccgctggcttgtgacgtctacaagggcgtggggcagcaggaaacaagaggagggatacctgtccctgtttcccattaccccagaggggaccctggaagcgccccggcttttcccctcagggggatgccacccaagaatgttctccatcacagagaatgacaactatatattgacagcaaaccaatatacgggaaaccttgtgagctttcggctggataaaaaactgggagctgtcaagatgtgtgacgcagtgcccattccaggggcggcctgtgtattgtgcggtgaaaaagaataaaggagaagtgagacatgaggaataaaaaagcagcaattaccggcgggagcaggggaattggaagaggaattgtaagaagactggccagagaggggtatgacatttcttttacctacagctctgagaggggaaaggcccaggcagaagccctggtagaagaaattactggacaatatccggtgaagtgcttctgccatggggcagccctgaatgagaaggggacagcggaagcatttgtgcgggaagcatatgaggaactgggggggctggatcttctggtctgcaatgcagggcagtcgctggttcacagtatctatgaaatggatgaacagaccattgattttctcatcaatctggacttccgttcctatctgatggctgcccgggaggcgggaagaatcatgggagaaaacggaataaaggggaacataatttttatctcctcctgcagggggctccgggcatttccctatgacgagctttacggaggactgaaggccggactgatccgctctatccagacttttgctctggatcttgcaccctatggaatccgggcaaactgtgtttctccggggcctatcagagtccggaccagccaggagctgcgggaagaaggcgtctgtgaacaggagatcgaggatctggataacctttggaagcagctgcccctagagaggatgggcacgccggaagacgtggcaaatgcagtggcatttcttgccagcgatgaagctgcctatatcacaggaaccaatctggtggtagacggtgcggcatcactgcccgggattccggaaaacaggcccaaagcagatgaagaatttaaaacttggtgtaattttaagcgcagatggtaggtgagagaggatgaagattgtaaaaggcagcagagagagggactctaaatctaagacaatatttcaggatggaagccatgcctatgagctggataaggactaccttaagcttcctgattttttaaaatatgtgccggcctgtacgggctgctgtgaccggaacgattatctatacctggcaaccagggacagagaccatcccatcgttctggtggatcccgacggatattatgtaagggatttcggaaaagggctgtttcagttcatacattctgtatttgtaaccagccggcagacccttctgtgtgcggactctaacagccatgtgatccgggaactgaccatggagggagagctgatccgggatttgggaaactacggggtgcccagcgacagcggataccagggagatatctggtggagaatgcacagcagcgggactgtgattcccatgaatcttccctatcagaaaaactggagttttatagaaagtattaagacaatcacccatgcggcgccgccctttaaccggcctacctgtgccgcagagacatcaaagggagatatctttgtgagcgacggctacgccaactgtgcactgcacaagtttgccccggacggaacccttcttcatacctggggagccccagggacggaaccgggaaagttttttgtaatgcacagtttatgggcggataaagaggacagaatctgggtggctgaccgggaagggaacagcgtgcaggtattccgggaggacggagaattgctggcctactgctcagaaggactgtatcagccctcagaaatatgggcggacagcgagtatatctatgtaggggagagaggcggcattaccatatttaattatgatatagaagttgtggcacagctgggatattatatgtcccccctgatgacccacggcttctgcggagattccaaaggaaatctctttgtgatgaccctgagtgaggaactgccgtattcccttatgcggctaaagaaaatgtaggaagaacggaggatttttatgctggtaaatataaacggaaaagagattggggaaggcctgaaaacaatagaaatcacaaatcctgtaaatggaaacgtgatagacacagtgccggatgtccctgaggcttatatcaacgaggctgttgttgcagccagacagggcctgaaggagtggggcggcctctcccaggcaagcagaaatgagataatctataaatatattcagctctatgaggaacaacggcacgagatcgccaggctgctgaccatggagaccgggaaaaccctggcagaggcggaggatgagatcaatgtatgcaccagggttacccggggatactgtgagatggctgcacacctgtacggaaactgtcttcccggaggcagcacgctgggaaaccaggaaaaagatattgtatttacgagaagagagccgctgggagttatggccattattcttccgtttaactatcctgtagatctgtattcccataaggtgatgtcagcccttgtggccggaaacgcagtgattattaaaccgcccagttacaatccccttgccgtaatccgcatggcccagcttctgtatgaggcaggtgtgccaaagtgtgcggcccaggtagtgaccggcaagggaagcgtggtgggagactgcctgtgcggaaatccggggctggatgccatctctatgacagggagtacagaagtaggaagggatatctatcagaaagccgcggcgaaccttacccgtgtatttttggagctgggaggaaatgacgcctttatcgtaatggatgacgcagacattgatctggctgtggaggaggctgtggggagccggatgggaaactccggacagatatgctgtgccagcaagcgttttctgattcaccaggcagtgaaacaggaatttgtggaaaagctggtgaaaaagctgaaaaaggtgaaaatcggagatcctctggatgcagagaatacagtaggctgtttaatcagtgagagcgctgcggtccaggtggaagaacaggttgccctgtgtgtaagccagggggcaagatgcatcctgggcgggaaacgccgggacagagcattttttgagcccacggtgctggacggggtaaccggtgatatggatgtggccagagatatggaaatcttcggcccagtatttcccattatcacagtaacctctgaggaggaggccatttccctggccaaccagtcctgctacggcctttccggagcggtattcagcagaaacacaggaagggcagtgtccattgcctccagactggaaacagcgggaaatgtcataaacggcggaagtgcctaccgcaccccggatttggcatttggcggctacaagaaaagcgggataggccgggaggggatatcccgaaccctggaggaactgacccaggaaaagaactatattttaaaaggagtactgtaggaggtgacgggaatgcagggaatctatacggcaattgtaacagcatttaaggaagacggttccgtggacgaggcaggaaccagggcggtcatccgccacagcataacccactgcggggcagatggaatctttgtggggggaaccatgggagaaaggtttaagatgaccaccaaagaggtgaaagaccttttgggtattgcagcggatgaggcatccggggagactgacctggctgcgaatattacagcgctggcagatgaggagattctggaacttgcggaggaagcccgcaggctggggtatacggcagcagctctggtccccccggtatttcacggatattctcaggaggagattgtgaatcattatctttatatagcggatcatatccatctgcctctgcttgtgtacgtgattccctccttttcaaaggtggactttacggaagagatgcttgtaagacttctgaaacatcccaatattataggattgaaatatacccacaacgattattatctgttggaccgagtgagagtgagatgtcctgaggccactatttttacggggtttgacgatgtacttctgcatgcacttattatggggacagacggcgcaatcggcggaacctttaatctgacaggagcttttgcaaagaagctttatgaagcggtaaaggcaggagactatggacttgccctgaactatcagagaaagatcaatgatgtagaggacatgctcaatgagacaggactgtttccaacaataaaagccacccttacctgcatgggggtgccgtgcggacagctgaaacgtccaagcggggctgtcacagaagcccagaaagaacaggggaagcggatttgtgaatatctgaagaggaacgggggatgagagacggggcagaatatacggtcagcaatgactatctctccctgacggttgcatcccggggggcagaggtggtttcgctgcaaagcctggaagacggtacagaatttatctggcagggggatccccgatactgggaggaccactcccctctgctcttccccgcagtcggggactggaaggacaaccgttatatttataaaggcagagaatatgagatgccccttcacgggtttgcaagaaacctgatctttgatgtccggcagaatgaaaaccagataatctgcacccttacttcaggggaagaaacgaagaactattatccttttgattttcagctgacgattgtctataccctggacaaaaatgtgctgctgaccgagcagtatgtccataattgttcagacggtcccatgccttattccatcggagaacacataggctttcgggtgcctctgctgcctggggaaagatatgaagattattatatagaatttgataaaccggagactgctccccgctatccgctcacagacggaagggagataggccccccggttccatgtctgaaagaaacacggcggatagatctggccagggatatgtttgaagggggagcatggaattttgaagggctggcctctgagagggccgttttggggaatacaagaaacagctgcagaattattctggactttccgggtttcagccatttttctctgtggtccagaccggaagccccctatctgtgtatggagccgtgcaacggaatggctgcgggaactgatgagggctttgatccctttcaaaagaggggaatccggatccttgaagcggggcagagggatagtatctcttacagcgtgacggttcagactgcctcaacggacagaaagctcgcagaagcgtaccaacagtctgtcatagagaaaaggatctcggtcaggaaatttagaaacagagtggtgacaagggaaaagattctgcggattctcagatatgccatgacatcgcccactgcagcaaataacagagaatgggagttttttgtggtaacggatccccgggagcgggagaagatttctaagatgagtccctatgccgggcctgccagagaggcaggcgtacttattattccctgtatgaactgtgagaaagtaagactggataagcagggcaacagctggtgggtggaagatctggcagcctgctcacagacagtgctgctgggggcaaaggaagaggggctggacggtgtctggctgggattttatccggatgaggaaagagtgggggcactggccgaatacctgcagtgcggcagccggtatgtacccttttctgtactggcgctgggatacgcagagggagagaggaagagaaaagacagattcgatcctgacagcattcactttatgtaacaggtatatagttttaagtaggaagacttccgttattttaaacggaagcttccttactttacgtacactatttatgtatttctatgcattctgcgggttgaaagggcatcttgtgccgatacactggttgtttttagcggtgtagccgcagatgattttttcaggcttttccatcccgacattaaatttttcccggataaagtctatggcttccagtacagcaatggctgaattacgcttacagcagcgaggccctccgattttcgcttcgtgagccagaacacgagacgtcatctcattgcaccatccccaggattcttcggacaaaggactagccccggtaataatggagatagtaattccggtgctgactgcggcgccgcagctcccccacagtccacagatacttccgggtacctggcggccgcgattttgcatctctaacagtgccttttgcagatctatctcgccgccggcattcttataggcggttaacaggctgctgcccaccaaaatgtggtgttccggtccatgcatatgacaggaggggagcgccatcagcttaagcaggatatcataaggattttttgaagattcactcagacataatcccaaaaagctgtcgatccctttcatgtgacattcactgcacacataatgtccgcctgcacagcggcagttgctggtttccactttatggcacagagcacattccatctgttctgcctcctccaggtaaaccaaccgttctttacagattaaacattcttcgttatttttctgcatcgtatgcttcctccttttatacgcaataacttttcggaatcttattccttaagactccgagatcggcgtctttccaagcttcccttctacatcagccatgtagatagaaacctccccgcactccgggcaaatcgccacctgtggttttccgatccggttggggaataactttctgtcgtctgttgccatcacaataccatatccggcgccttctacttttatggagcaatgctcaaccatcaccgtaccacatctgatacatttcctcatagccatgtcacctcccttccctggaagaatagtcacatagacttctcgcttattctaaatattgtgctgagccttatccgccgcagacagataagtactgttaacgacagtgtagaatagtgctctttacttgtcaatcattttataccatgcatctggaggacactcttgggtaaccccttcggcagacataaaattttggttgaaaggcactaacaggaagggtaaaatatatggtatagtataagttagcagtaaaataataagaaccgtaaaggctgagggctatatgtacacaaatatactgagaactatatataaaattgaaaataacaatattttttcttctatcagaaagggcttcatcctgctgattcctgtacttttgctgggatcttttgcccttctgctccgtaattttccaatggcagcctttcagtcttttatagaggtgtggggcggaggatttttcctgacgatacttaattttacttttgactctacggttggctttatgtctgtctaccttgtaatgagtatcagctattattattcctcaaccatgaaggagaggaatccttttctcagagtgatggcaatggtaatatcggtggtctgcttcgctgccagcttcggggcagccagcggttctatggaattaagcgatctgggacctgttggggtttttaccgccatgttctcggcaatagcgggaacgcggttgttttatctgttttactcctggatggcgaaggaataccggttccgttctccgggaacagatgtggattaccggaactccctggcatcattgtatcccctgcttttctgctctctcatttttataggaatcaatctgatgatacagaagctattccatgcagagaacctgaatgatctgattacaactattattgtaaatatattccatgatataaatgacggactgggtgcagggctcctgtatgtgtttgttctggatttcctttgggccttcggtatccatggggggaatgccctggagcaggtggcgcagacctatctgcttcccaacgatacgttatcaggggttgtcatatccaagtctttcttagataattacgctttaattggaggctgcggtgcctctatctgtctgctgctggcgctgcttttgtttgcccgcggcagagataaccgatatctggcccgttcggccgctcccgcagtattttttaatattaatgaaattctggtctacggcatgccggtggtcctgaaccctgttatggtgatcccttttatcctgacgccaatctgttctcttttgattgcctacggggcagctgcctcagggtttctcccaattctgcacaagacagtgacctggaccacgccagtgtttttcagcggttacctggcctccggatcctggagaggcgtccttgtacagcttgtgatcgttgcagcgggaacggctgtctacgcaccctttgtaagaatcgcagaacgggtgagaaagaatcaggcggagctgcttttgaatgagctgacaggacttgtgaaggaaagtcaggataaggggcggaagattattcttctggatcgccatgacagcatcggacttttggctagaaatatggctgcacagctccgtgtagatgtggaggagaacagactgcccctggaatttcagcctcagtatcacagcagccggggtttggttggagcagaagctctgctcaggtggaagtatatgggagagaatgtataccctccactggcggtatccctggcgcaggaggacggtttttttgacaggatgacaaactgtgtaatcaaaatctcaatgagtgcatgcagggaattattggatctgggatgggatgttacggtttcggctaatatatccgcagatcagctgaactcccctaaatttacggaaagagtgctccgcatggcagatacttatggagtgagcggccattattgccttgaggtgacggaagaagcctctgtggataagctggaagagatttcggctcacattaaccgcctgaaagcggcaggcatacagaccgcggtggatgatttcagcatgggaagcaccagcctgaagtatctgcagcacaatagcttttatgcggtgaagctggacggcggtctagtcaggggaatcccaggaaacagcagaaatcaggaaatcatatcctctattatttctctgggcaggagtctggactttcaggtgattgcggaatacgtagagtcagaagagataagggacaccctgaaaaaactgggctgtgacttataccagggctatttgtacagcccggccgtgcctctggagcacataaaaagaatgcagttcggacggaatatatcaaacagcaaaggcgaaagcccggaggagcaaacgagttatgtataataccattcaaagcctgttatcctgtttttttcttttaatcggctttcttattctttgtaaacacagatattctctcagaaggatgctgatcagttctgcggcaatcttatttttatgctttggtctgtacgtgttgggactccggcttggactgaaaactccggctgctgctgcgatttgcctgacaatcccctcctttctgctctgcgggcaattgtccgggtatcgggactttcggtatgtatttactttctgcagtgcagatttatttggaattgtgatcatgggtctgtgcaatgcgttcaatatggtcatgaattttgatgtagaggataacagactggtggccatagagtatcttttgatgttttccgtgctttatacatttttctggagagtgcgaaaagaatatctggagatccaggaaacccagaaaaagggttgggggagtctggcacttttatccgtaaccttttatgccatgatctatgtgttaatgggctatcccgcaccaatcagagaacggaaggaatatctgcccgtatttacttttgtgctgatcgctatatcactcacatatattgttatctttcagttcattcagaaaatgaaacagcaattcgaggcggaagagataaaacagaggcttcatacggaacaaaaagaaaaagaactgtactcccaaatggcctatgtggattatatgaccaagatgaagaaccgggcatatctggcaaaacgggagcaggaatttcaggctgactgggaaaaagtgctgccactgacatgtattaccttggacattaataatctgaagcaaataaatgacaataagggacatgccgccggcgacagcgtaatcctgagggttgcggggattctgaaaaaggtatttcccggaactgaggacatataccgtctgggcggcgacgaatttttggtccttttgcttgggcaggcgtcctggaaagcttctgtagcctccattgtcctggaactggaacggaacaatgcagaaaatgagattcagataacggcagcggtaggggcttttgtccagagagaaaaggggctggagtctttcacctcaagtatgaaaagagccgacgaatatatgtatgaagataaacgaaaatataaggagaggtatcatgacgcagaaaataaaagtcacctgtgagatggaaattacactgaaagtaatcggagggaagtggaagcccctgattctgcattatctgcaggaggaagggccgaaacgatacagcgagatacttcacttcctggagaaagcccctaagaagactctgacaagccagcttcgggagttggaggaggatggagtgattaccagaaaagtataccctaccacgccggtccaggtggaatactctgtcacagagcacgggcagacactgtaccctatattggaaatgatgtgcgagtggggcagcgggaatgagggcggcaggtacgagataacgaatcgtcagtgctgctgatctaaggcagggaaccaaagggtaacctgggcagatgaaagtgccttcttgcggcaaaacctgcaggaaactataatgaaaaaataatgtgagaatacaggaggacaatatggataattttacattttatgcaccgacatatttcgtgttcggcaaagatacagagaaggaagcgggacattacgtgaaaagattcggaggaactaaagttctgctccactacggtggaggctccgtggtccgctccggccttctggagagagtaaaggtatctcttgaaaaagaagggattacctatacggaacttggaggtgtgaagccgaacccaagaagcgggctggtctatgagggaattgagatctgcaagaaggaaaaaatcgactttatcctggcagtgggcggaggaagcaccatagactcttccaaggcaatcgcagcgggagcagtctatgacggcgacttctgggattattatcagggaaagcttgtagaacaggcactccccgtggggaccattctcaccatcagtgcggcgggaagcgagggttctcccgactctgtaattacctgtgaagacggcatgtataagagaggtgcaacaggcgaaggactgcggcccaggttctccattctgaatccggccctgacccagacgctgcctccctatcagaccgcctgcggtataactgatattatggcgcatttatacgagcggtatatgacgaatacccaggatgtggaggttacggaccgcatgatagaggcccttatgatgaccatgattcatgaggggccgaaggtaattgcggatccaaatgactaccaggccagggccaatatcatgtgggcgggcatgatggctcataataattcctgcggcgtgggaagaacccaggactggaccagccatgatgtggaacatgagctatccgccctttatgactgtgcccacggggccggacttgcagtggttatgcctgcggtaatgacctacaatatggggcacaatgtgatgcggtttgcccaggctgcatcccgggtttggggatgcccgatggattttgcacatccggaggagacagccaaggcgggcattcaggcattcaaaaacttccttagctccataggcatgccagaaaattttcgggaacttggagccagggaggaggacattgaaaagctggcccatgctgcctgctggggcgatgtaagaaacggaacgctgggtggttttgtcaaactcaacgaggaggacgttgccaatatctaccggttgatgctgtagacatttgtctggagccggacaacaaaggaggcgcctcctcccggggtatcctccacagagatcctgcctttgtgcatccccacgatctcttctgcaatacaaagtcccaaaccaaaatgttctttatcatgatgggattcatccaaacggtaaaagcgctggaaaacggcgcttttttctttgtccggaattccgggcccgctgtcgcagatgcggtattccagccccccttttttcatatggagctccagagagacactgcctcccgatggtgtatagctgaccgcgttatctgccagtatccccagaacctggctgattctgccgctgtcccagtgttgaacggggaccggtgtatcgggaagaagaacgttccagtgcaggcccttttcatgggccagaggctgatatttctcgtaaatatttaatagaagcgtatcaggttcagccctttccgggtgtatggcccaggattggctgtccgcactggagagggagagtagatcaccgatcagccggttcatccgctctccttcctcctggatatgggaaaggaactgctcctgctttttaggaggggttcccctcagggcagaagtgctggaaagaatgactgccagaggcgtacgcagctcgtgggaggctgctgcgataaattggttctgctttttctgtccttcctccaggggctttatcagtctccgggtgaaaaaccaggaaaaaatccagagaaggaggaccccgcagccagctgcacccaaaaagagcatccgcctccgcagtacctgttccctttccctgtccagagggtacacaacggtggcagagaggctcccggactctctagggaggagagatacggctgcataacaggagggggtgtccagagtaaaaacagcggtattagccgtgtattgattcctgttactgtccgagacatcaacaccgtaagattccgctgctttttcctcagccagagcaaataatcggggagcttttgtgccgctgtcaagggtccggtaaaaaagctcctttccattgtcggtaatccgaatgtgtaccccgtaattgtcctccatctcaagaagccattggtgggaaataatggactgactgctcagataggaaagcatggtattcgtattcgtatgaaatgtcagataactctccctcgaagcatctgtttctgagataaacaggcatacaaaggtcatggcggctaaaatcagactggtaatcccagtggaaaacagggcgaattgtttgtgaaggcgtttaaacattggcatactccaatcgatagccgactccgcggatggtcttcagggtgactgtgctgtccacagaagtgagacgcctccggataaaatggatatagttgtccagattaccgtcctctacaggagcacccggaccccagactctggaaaagatagcgtccctgggcacggtattgccgtggtttctgataaacaactcaaataaatccccttcccgtttggaaagggtacactgtccccctggcccggtaagcacattttccccgggacggtagcagagatccccatatgaaagatccgtctgtgccacaagattctggggtctgcggaagatggtacggatacgcgccataagctcttcaaaggcaaatggttttactatatagtcgtcagcgccgcagtccagtccattgattttatcctgaagttctcccagagccgtaagaaagattactggtgtctgcattcctcctttccgggcggctttcagcacagaaataccgtccaatgaggggagcatacggtccagcaggaccagatcatagccgccggacagcatcagatccaacccatccgtccctctgtggcacacatcagtgcggatattctcccgttccagctggtatgtcagggtatcacacagttttttatcgtcttctatcagcagtattctcataatgaggtgttcctttcccttatcctattgcagcaattataacataaaaacctttaatgaacctctaaaaatccttaaggcaaataggcaggaacccttagagggtagatagaggttgttgtgctatgatacctatataacagaaaaatacctgtctgtcctgcccggatgtacaggtaataatacaaagagggaggctgatgcttatgaaaagaagaggaaagaaaatacgctggctggcagtggtgtttgcagcattgtttttctgcctgacaggctgctttggggatgcttctgataaagaaaaggaaaaagaggcggatacccggggaaggtatctggagacagaagtaaagctgccggagcatacaaaagtatttgatatggtaaaaggtacagacggagtcatacgcattgcagttcaggatcccggagaagggctggctgtatgggaaatgaaagaaaagggagatacctgggaaaaggtatacaatatagagattgacctgaccggctatgtaacttgtgcaaatctggcgagtattgccctttctcctgaaggcggtgcggcagtgctggcatatctggaaagggcagataaaaatgtggatatcaaatatttttatgtcagtaataccggggaggtcagtgcgtctccctatcagtcggatccctccgagcttgtctctcagcttaattatacatcccagggggacttttatcttcaggcaggcttccgcgtaataaaggtggatctgaaaaccggagatgcgggggaaatcgtggaaagcagcctgcagacctcctactacggaactgccggcagccggctgtatgccgtagactggaaaggaaaggtgacagaatatgatctggagagcggacttgtggcagctcctgataaagggcttgccagtgccatagagcagagcggactggaactgggtgaccggcagggaaatgcagatgcggcacctgttatcttctatggaggtgaagatccagacaccctttttttctgcggggataccggggtgtattgccatataaaagatggaaacatagcggagaaaatcatagacggcggactgacctctctgggaagccctgatatggaatttaaggctatggagatgacaggagacagtgaattttatattctggcaacaggagatgacggggataagcttctgaattatacgtacgatccagaagtctcaaccatcccggagaaggaattaaaggtttattcactctatgaagacggggatttcaggaaggccatcactcagtatcagaaaaatcatccaaatctttatatccgatatgaagtaggcctggaggcagacagccagaaaacggtatcagatgtccttcggattttaaatacggagattatggcgggtaagggtccagatcttctgctgttggatggtacccctctggacgcctatattgaaaagggaatcctggaggatattaccggcattgtgaaaaaggtggatgattcagaaggcctgtataccaacattacttcaggattagcaagggatagcaaattatatgcagtgcccctgcggttttctgtacctgtagcggaggcaacggatgattccctggagcggattatagatctgaaaaccctggcagatgaagcggaaagacttcgtgacgagtacccggatcaaacgattatcagtgagaaaaacagtggcagatttatggcggcacagctttacgatgcctgctcatcttcctggctgaccgaggaggggggagtgaatacggagaggctggcggatttttacctgcaggtgaagaggcttcaccgtgtggacagccatgaggaggataccttgtatgatggggacactgtggaatacatggagtatataactaacattacaggggatctgctgatgccttacagcggcgcctcattcctgaactttggaaatataagagatcccgagggggtggccatgcttgccaaagcgaggcaggagacagggactgtagggtataagcctttttccggggaaaacggaaacgcctatcttcctgtgtctattgcaggagtaaacgcaaaagggagcgagacagagctggccgtaagttttctggagtttcttcttaaggatacagcccaggggtactccgggaacaccggacttccggtaaataaaaaggcaatggcaaggcttcttgaggcagataattttgcagaggatatcagaggcgccgaagacccccgaaatcccggtgaaactataaccatgtatctggaaaatctggaccagggggaactggatgcatttatgaaggaagcagaaaactttgccgcaccggccctgacggacgaaagaatccgacaggcagtgctggagcaggcaaacagctgtacagaggggacaataactcctgaggaagcggcagaaaaagcggcggatactgtaaagctatatctggcagaaagatagggttgcaatgtatatgagtgacaagcaaaaaaaagctgaaatgcggaggccgaaatacagaacttggtcgggattaccttttgtcatccccagttttattggaattgtgatctttattctatttccctttctggatgtaatcagaaggtccttcactggagcggtggggggaggatgggtgggactggagaattacaggcagacgttctccaacagtgctttccatctggccttgggcaataccataaagtttgaacttgtttgtatccctctgatgattattctgtctcttggtatggcgctgtttgttgtgagatacgcccgcaggggcgtgatgaaaagctgtatgctggttcccttggccataccggttgcctccgctgtacttctgtggcgggtaatgtttcatcagcagggtgtactgaacagttttctgatgttatttcacagaggacagacagactggatgaattccggctatgcatttggggttctggtgtttagttacgtttggaaaaacctggggtataatgtgattctctggaccgcgggaattgcgcagattccgccctgtctgtatgacgcggcccgggtagacggggcagggcattggcagtgcctgtggaagattacgctgcccagcctgctgccttctctgttcacgataactgtgttatctgtcttaaattcatttaaagtatttcgcgaagcatatctggcggcgggggattatcctcatgagagtatgtacctgcttcagcacctgtttaacaactggtttttaaatatgtcgctggataagatggcggcagcctcagtttcctgtgccgccgtcatctttttgctggtactgcttcttatgcggacgtggaaaatacagacataagaggggagattaatgacaacaagattagaaaataaaatactggaaaaagtggcggcagggataacagctgcagtattgctggtctgtgtctatcctgtttggtttcttctggcaggttctgtatgcgggagggcccaactgcaggagctgctgggtccggcccttgccggagcggaggggatggcctgccttccggtggtgcccggttaccccaccctgcggtggtgggctcagctccttctggattcaccggaattctttgtaatgttctggaattctgtaaagctggcgggaggtatcctggcaggtcagatacttatcagcattcctgctgcctggggcctggccaggggcagattcccgggcagggatacactttttgctctctacattctcctgatggtgatgccttttcaggtgctgatgttgtctaattacctggtattagataaacttcatctgctggatacccatctgggcattattctgcccctgattttttctccatttcctgtttttataatctttcagttttttagaggaataccggaggaaatgttagaggcagccaggctggacggagccggcgaatggcagatttttgcttatatgggcgttcctatgggcacggctgggattgtatccgcgctggtactgggttttttggaatactggaacttaatagaacagcccatggcatttctcaagaccaaggagttgtggccgctctctctgtacctgccggatattggccccgggcaggcaggaattgctcttactgccgctgcagttgctatggtacctgccatgctggcatttttttggggcagagaatatctggaaatggggattgcggccaccgcagtgaaaggctagaggagggaaagatggagaaaaaaaggttgccgaaactaactggatttttctttcttgccatgctgatctgtacactgatttctagagccgcttccagtattacagtggctcagataacggctgcaagtccggtgaacggcatgatcacacataaagttacggcggaagggaagattcaagccaatagggagctgccagtttttacagaggctggacagcgagtggaaaggattatagtccatgagggagaaaaggtgaaagcgggtgatattctgtttcagctggatatggagcgattacaggaacagatccaggagagcagacaggagctctcaaaacttcagctggagctggaagctgcggtccaaaatgcagagttggcgcaggaaaaaaaggaattggccagacaaagggcgcaggaggattatgagaggatctcagaagaaaaggatcaggatattgcatgggctgaggcagaacttgtgaaggccagagagcggctggaggaatattacaattaccaggacgggggggaagcgtctgaaggcggacagtcggaggatgcactggcagacagcgtggatgcagcacagaaaacttatgaccaggccctgactgtcagagaggaaagtctgactgctgccaaaagagcgatagaagacgccatgatgcccgagccggcggacaatacacaggagataaaacagggagaaattgcgcagacagaggaaaaaatggagaagctggaacgcctggctgataaaaatggagaagttgcgtcgcctgaggaaggtatcgttaccgggcttcagatatctgccggacagataacaggacaggacgcagccgtacttctggcagatctttcggagggatgcaggtttgtggctcaggtagacaaaagtcagggtgagtatctgcagaaaaacatggaggttactctggaaaatccggataccagagaaaaagaaggcggacttgccatcagctcattgggagaaaatgcagagaacggagagcttctggatgtaactgtatctctttccggctgcaccctggagattggcacttccgccagaatgaccgcggaaaaacgttcgtctgcctatgccttctgtattcctgtacaggcgttgggggagaataacagcggtacctttgtctatgttctggaagaacaggagaatgtgctgggacgagagctgtctgtgagagaggtaaaggtagaggtagaggataaaaatgatatgtatgctgcgctgaaggaggggagtctttctgaagggcagcaggtggtggtgtcctcggacagaagcatagccggaggcagccgggtgcggctgaaggagtcttgagaacggcaaggtggtatctgatcaggattctgcttctggcggctattggaatttcctactttctctgtataaaaaactacagagagatagaacagctgccggatactgtgacgatatcctgcagcgggggatttcagaaggacggcaacggcgatgaaacttggggaaacagcacctgggagtatgccttgtgggaggaattagagggagaagtggtcagtaacccgaatctgaacagacagtataaggtatctgtgacagctgtgagaggttcctgcagagttctgctgccgcaggcctattggatgggagacagcgatggagaaggctgctttttggatcggacagcggccttgggggtttttggaagcactgatgtggtcggaaaacagctgctgtatgaagggagacagctgactgtacggggagtcacagacgacaggggaggtattatgttaatccggccgaaaccgggagaggctttgaagaatatcattctttctgttcccgatggagccagccaggaggtgctggggacagaatttatggcgatccagggaatccagggtaccgtcacagataaccgtccatttacaggtattgttcgtctgctggttttgggattcccgtttaccatcctccttttttatctgtgccggctgaataaagtgataagggggatgacagccacgccggtactgcgtatgcttgcaaccgttatgacagtttgtctggcgctttttacgacaggtgtatttcttacctgtctgcacattccacgggactatgtgccaacgaaatggtcagacttttctttctataccgggcgggcagaatatatattggggcagtggaagcagtattttcagatcccaaagagtaaactggagattccatatgttttctgttccctgaaaagtattctgtacggactgttatctcaggtgttttttgttctctccaccggtcttgacagggcgttcctatatgagtaaaattgacagcggtgttgttacatcggaaaagaaacagaattggaggttacaaaaatgagtgtgattcatataatttcaggccctgtcataggagcagtgataggatattttacaaactatatagcggtcaagatgctgtttcgtccgtactatcccataaaggcaggacggtttactctgccctttaccccggggattattcccagaaggaaggatgcgctgggcgcagccgtggggagagcggtgggcagctctctgctgggggaggaagagataaagcagattcttttgtcccggggagtaaaggaggctgtatcgggaggtgtcctcagtgcattagcgggcggcaaagaggtaactgtaaggaaccttgccgtttcttgcatgagcagtgaaacttatgaagattataaaatacagttggtagattatatcactgacaaggcagttgaggggatagataagacagatctgggaagtgttatcgccacgcagggcgcaggggcagtaaaaagcatggatctgggtgtgatggctatgtttatcaatgagaataccattgccgcatttgcaaagcccctaggggataagataacggaatacatccagagagaggggagggataagatccgggcctatatctatgaggaggtatgtaaaggggaggaaaaggatctcagggaactgggccaaaagtatgagcagattgatataaaacgaatcatagaacaggcatataccaggatgatcgacagcaaagcagatgatattgtaaaggaattccatattgccgagaccatccgtgagaaaattcagaatatgggagtcaaagaattggaagaactggtgctgtcggttatgaaaaatgagctgaatatgattattaatctgggcgccctgatcgggtttgtgatagggctgctgaacattctcctatagattgactccaggttcaccttgggaagaaatccagatatctgctgtattaatgtttgggaaaaataaataagcggggattatttgcagacatggtccgtctaatgagtataagcgcttacaagagactgttgcagcagcagaaaggaaacctatgaaggatttggtagaaaaagcaaggaatggggataaaaaagcatttgaccacctcatccgctctcagatggaaaatatgtataagacagctatatcttatttaaaaaatgatgaggacgcggcggatgccatacaggaggccattctgacctgctacgagaagctggatacattataaacagacggatattttcgaacctggcttaccaggattctcattaataagtgtaaagatatgctgagaaagaggaaggtttattaccttgaggatgaactgtctgaaattccggtggaagaagatttttctatgattgagtggcgggaactgttgtatatgcttccggaggagtataggattgcggtgcttttatactatgtggaaggctttaagattcgggaaatcagtgagattctggatgtgaaggagagtactgtccagtccaggcttgcaagggcaagaggaaagctgagacaggaatatccccaggtgaagtaggaggacggagtatggaatatagagagaaagactatttggataatctgaaacggaaggtagaggtgccggacatcgtatggaaaaagacagaggaagcgctggaacagatccagaagcagggaaagaaaaaacggactgttttcagtagatgcagatggactgcaggaagggcagctgcggcagctgtggccgctaccctggtgctgggaaccgtaactgtgggggccatgtctctggcaggatggcatcagaatgttgcggatgagctggaggcatctgaggaacagcagactaagctctccggtgaaggtatggtaactgacgggacggcatctgctgcggacaacgggattactgtggagagcatacagaccattgcggacagccgctatatttatttctggtttaaggtgataaatgagaatccaaagattgagctgacacagaacgataccttccgtgattttgctatccaggtggagggccaggacgcaggctttggcatcagcggaggaagctttgaggataccggggaagaaggcgtgtatctgtgcagctattacggaagctttgaaagagagatggaacctgggtctataagggtaaaggcggattttaacggcatcagcgcttacgataaccatttgcaggagaccaagacctgccagggtacctggaacctggaatgggatgtccaggtaggagcggccgccagaaacattgaggtgaagaaagaagttccgggctacgagccggtaacacttgaccgtctggaattgtcccctatttcctgcactgcctattttgaggcctgggagggagacgcggaggaagagacaccggtactggcgggattccgcatgagagacggtagtattgtgacagatttcaggggcggcccgggaatgtcgtcagaggagaacggcatctttaaatccagtgaggggtttgccaaggttgtggatacggatgacatcacaggaatcttctttatccgagaggattatgctgatacaggagagagagaattgacagagtcagatatggttgagatagctctggaatagtaaggttaagcaaaaaggcagcggttctgagtgggggaacgctgcctttttgcttatgcatcttgcaaaacgaatgtttcaggattatttatgtatcggcagcaggtacgataccgggaatccggttcaggatttcctgatacacttcttttgttttttcactgtctttgccgttgaatacaaccgtcccttccggcgtttccacaatgatatattctttacaccggttataggaatagagcacatacttgccgaaccggtcgtttttaaagtccccggcacgcagcacgtaatttcccagcccgaatactctccgccccggtgtcagctgatccgtgtattcaatagactgtatatcgctgtacaggatttccttatcctcccacccggacgtatggagggagattccgctgttatccagggtaatggtaagtgaaccggtaaacatagttatacccaccagcagaaaagtgactgcaataaatcccagaataagcgccttagagcgcttttctttttttagatctctgggtttgggaggcacggagacaggggatttgttcttgcatatggtattcatggcaatgagcattccaatgattatgacaggaattcccacgcccaaaatgataggaaacatacgcgaatgtccaaatcgctccaaagctgagagcaaaagcagaacggtaatgagagctgtccctgtcccggtaacacggcagagctttttctcgtcatattttgccttctctctggcacttgatgtattgtatcctgctattaaaaatcccccttttcctgagagcagaacagcagagagtatagcgaacagtataataataggccataacatagaacttcaaatcctttcttttttctttgtatacagggcgctgcttgcggtcccggaatcggcatgataaattgattgtaacataagaaacatataaattcattagtatcctatctttttttactcctatggtgttatacctaatagagagcgctttctataagaatcctgaaaggaggtgcagtattggatcaggacttttttctcctgcagaaaatgaaatccggtgatgaatcggctatagatgagtttgtgaaaaaatattatcctgctattctcaaatattcctttttccatgtgaatgaccagagtaaggcagaggatattacccaggatacatttgaacggtttttccgttctttcccagactaccggcattacggaaaggctaaaaattatctctacgtaattgcaggaaatttatgcaaaaacacatacagaaaaaggaaggaggagcctctagaatctgtcccggaacagtctgtgtggcccttagacagagtaattgactccctcgtcctagaacaggccctgcgtcagctgccggaagagatgagggatgtccttatactgcactactatcaggatctaaagctaaaggaaattgcgaagatacaagaaatcggacttcctctggtgaaatatagaataaaggctgctaaagaacgcctgagggagattttgggagaggaggaactgtgatgaaagagggaaaaaagagggaccatgtgacagcccgacagccggaaggaccggaggtccgggcagaaaaaatagaggagacgattcttctgtcaaaacaggcgttttaccggcatgcggaagaacagagcataactccggcagagtttttagcagttcagctccggtttattaataaaagcatgtgggtgctgcagatcggtatctactttttgctgtggctgactctgtactggcagaaacatggggcgctgccgtacagcggcttcagtgtatgggttcctcttctgggcatgacactgattccggagctttggaagaatctgagaaccagaaccatagagatagaaaatgctacgtatttcggactgaagaaggtttatatagcaagggtgctgctcataggaatgacagagcttgtgctggcaagtatattttttatctttacggctgcaactataagaatttccctttatgaagcggtgattaatttccttgtgccgtttaatgtgacctgctgtatctgctttacagtcctgtgcagtgtgaaaatgaattcccagctgatggctgtaggcctctgtaccatatggtcctttctctggtaccgggttgtcattatggaaaagctgtaccgggccattgctctgcctgtgtggcttctgctggttgcggtttcattgatttttctggtttatgtgatagtgcgggcggtaagcgttaccgcgcggtattgtgaaggagagtggctatggaattacaaataaaaaatctgacgaaagagtttaaagatatgaaggctgtaaatcaggtgtcctttaccatggagcggggagtatacgggcttttgggggtaaacggggcaggaaagacgacactgatgcgaatgatctgcactctgctgaatccctcaggcggaacgatcctttggggcggcagggatatcttttccctgggagaagagtaccgcagagtgattgggtatcttccccaggattttggttattatcctgaatttaccccagaggattatctcagatatatatctgcactcaaaggtatgaaacctgcggcagcaaaaagaaggattgacgacttgcttcaccaggtggggctggcaaatgtcagaaagaagaagataaaaaagttttccggaggaatgaaacgccgcctgggcatagcgcaggccatgctgaaccgccccaggcttctgattctggatgaacctacttccggcctggatcccaaagagaggatccggttccggaatttgatcagcgaactggcagaggaaggcattatcctgctgtccacacatatagtttctgacgtagaatccatcgccaacgagatcctttttatgggggagggacagattgttgattccggttctcccgcagaactgatagagggcatctcacgaagagtaaaagcatgggagtgtgtgatggagaaacgggaggcagaaatctatagagagcgctatcgtgtatccaatctgaaaatagaggcagaaggggcaagactacggatcttatcagaggtacggccctgtcctcaggctgtacagagccctctgagcctggaggatgcatttttatactatttcggagagaaagcaggtgaggaacatgtacaagtatgagctgaaaaaggtaaccggcaggctcagcacgaaagtgacactggcagtgttctgcgtctaccttatctggatgctgggtgccttttatattagaagtgaggtctgggtaaatcctcagggagaagaggaacggggcatccatgccatccacaatttgaaggaagtgaaaaaggagtgggaaggccctgtcacagaggaaaagattgcccgggtgcttgaggccaatgcccgtatcacgtcggaccccgaatatgccctggaggagggaggattgagcaatatagggtatgcgaaaacgcaggggttccaagacatcagagggttgattaaccagtccttctgcagttttcaggaaaatgattattatatggcagaccgtttgagtcccgaagatgcacagcaattttatgccaatcggacagaccatctgagggagtggctgtatggggagtatagcagcagcttcagcgataaggaaaaagcatattacatacaccagtttgagaaaatggaagttcctctggaatacagataccagacaggatggagcaaaaccatagagtttatgatggtggttatcatgggagccgcaattgttgtgtgtattcttgtggcatctgtatttccctgggaataccagacaggggcctccggcgtgttctattccagctgctatggccgttcccggggaataaaggtcaagataggggcagtcctaacaatcgctacagcggtctactgggcggcagttcttgtatccagcggaatactgctggctgttttcggaacagacggcgccgggtgcatgattcaggccaatggattctggaaaagtctgtataatattaccaatctggaagcctatatcttttgcattgcctgcggttatatcatatgcctttttatgagtattcttaccgcatggctatctgcagtgacaggctcctccattcttcctatagtgacaagctttttgctgattatggctccggcagttgtgggacagtacgttacaggcggactggcaggagacatcctgggacttcttccccatcagctgatgcaggggactactcttctgagattgtttacggtgtatactataggaggaaaggtagttaatctctgccagattctgcctttgctgtatctgggaatgacagccgttttgctgccggcggtatatctggtctacagaaaaaaggaagtttattagagcatagtatctcgatcttgtgatatttctaaaattgcggtttatgtcccaaacacttataatagataaaaaagaaggagtgtgggagatggaccgcattttaattatagaagacgacagagctctgaaccggggcctgcagtatggattcggccaggagggctgccaggtggagggagcatattccgcagaggagggaaaagcactctttttatcccaggtatttgatcttgtgattttagatgttaatcttcccgacggagatgggtttgagttctgccgctgggctatgggggtacggagggcacccattattttccttacagccagggatctggaggaggacgcagtaaagggctatgacctgggggccgacgattatgtgacaaagccattcagtatggttttgctgaagaaaaaagcggcagcagttttaaatagaacaaaaggtggaaaagttgaagatatttatgaggatgggtatctttggatagattttaccaggttcagggcagcagtgaagggaaaagaggtattttttacacccactgagtataaactgatgcgcgtttttattgacaacaaaggccaggtgctcacccataagatcctgctggaacggatctgggacagcaacggacagttcgtggacaagcatgctctggccgttaatgtgaaccggctgcggggaaagattgaggacgggaggcacaagtacattgctaccgcctatgggatgggctatcagtggacaggagaacaggagtgacaaaggataaatcggaaaaaaggaaaagacttttaaaatggtccgggtttgccgtgggggccatcacctttatgggagtactgtatgtggttccgggaaagacggcaaggctgctgtctgctctggggtatctggggagcctgggcatctgggccgcctatacctggtgcataaaaagggatatctggaggtttacggattctatggaaaaaagtctggattatatgatccaggggagggaggacctggagtttgatgagacggaagagagccagctttctaagcttcagacaaagctgaagcagctttatgagatacagaattattatgcacagagcagcctgaaggagagaaagagaatgcaggagctggtatcagacatttcccaccagaccaggacaccggtttccaatatcaaaatgtatgcggagatgctgggggagaagagtacagacagaaatacagaagtagagtttcttgtacagataaaagaacaggcggataagctggattttctgatacaaagtctggtaaaaatgtctcggttagagacaggaattctgaagatccgccaggaggatgccctcttttatgacaccctgggcagagcccttggaagcgtgctgcccagggcagaccgcaaagacattcagatatctgttgactgtccggagaatctgtttatttatcacgatcccaggtggacggaagaagcactatataatattttggacaacggggtaaagtatactgaaccgggagggaagatagatgtcttagtgaaggaacaggaattctacactcatattaccatccgggacacgggcaaggggattgaagagagccgccggtgcaaaatctttggaagattttaccgggagcctgaggtccgcgggcaggagggggtcgggttaggtctgtatctggccagagagattatcaccagacagaaagggtatatcgaagtccggtcagagataggaaagggaagccgatttcatatctatctgccgggaaaatcacagaattgagagaatagccggatgagataagtttgagatatttctttgataagctgggtctatcaaaggaaagggagttgaaaccaatgtcagaggaagttgtaaaaaccataaaactgaagaagtattatgatatgggaaccaatgttgtgaaggcgctggacggcgtggatctcactatagagaagggggaatttgccgctattgtcggaaagtccggaagcggcaagtccacccttctccatatgctggggggcctggatacgcccactgaaggcagggttctggtgggaggcagagatctgagccggatgaaccgggagcagcttactatattccggagaaggaaggtggggtttgtattccagagctataatctggtgccggatctgaatgtatatgagaatattacacttcccattgaactggacggagggcatattgaccgagaatttatggatactctcatgggcgtcctgggactggaagaaaaaagggaggtactccccaacaccttatcgggagggcagcagcagagagttgccatagcaagagctctatccaccaagcctgccatcgtgctggcagatgaacccaccggcaatctggacagccagaccagccacgacgtgctggggcttctgaaggcggccgccacgcaattccatcaaactcttgtggtgatcacccatgacagtgatatcgcacagcttgcagaccgaattctgcggatagaagacggcagaattgctgacagggggtgacgggagtgctggaaaataataatcaaagaattatccgcaaaatggcaaaacgaagcatgcagggcaataccaggagaaatagtatcctcatcgcctccatagccctgtctgcctttatgcttatcacagtgctgacagtgggaattacatactttaaagcccagagggaccagacaatccgaatgtacgggggagtccacgatgcggtgcttatggcacccagcggggaacagattgaaaaatgcagaaacgacagcaggattgaagaggcagggctgaccgttaaatgtgccagtgcagagagcaatggagtggatgacagccttcatactacttttatatggagcgacgggacttactgggacgtacagaaaaggccggctcttaagtggataaagggggagtatcccaaacaggagaatgagctgatgatttccatgggtgcgctaaaggaatgcggatcagaaaatgggaagatcggcgaccgccttactctcacgtatggagataaaaacggaaagcataaaaaagaatttattatcagcggtatctatgaggattacagtggggagactgccgcatatgtatccgaaaagttctataggactacgggacacaaaccgtcggatgtcacagcgggagtcatgtatctgagcttttcccgtgctctttttacggataaacagctggatacctttcgtgaggaactgaatctggggaaacagcagagacttttgtatacaggaatcacagagcattccctgtctgtatttttggggatcctgggcctggtatttgtaacctgcgtctgcagctatcttctggtatataatattctttatctttcagtcactaataatatccggtattatgggctgcttcagaccgtgggtatgacagagcggcagatacacaagatgctttaccgccagatgtttctcctgggaggggctggaattgttctggggctggcggtgggcagcgggactgcgtttatcattattcctggcattgtaaagacaattgggatccggggcggggccgtttctgtatcctttcatcccttggtgtatgccgctgctgttctggtgagttgtcttactatttactttggcagcagaaaaccggcgaaaattgcaggacgcatctcaccggttgaggcagtgagatatacagccccgggaggcggcagaaaaaaaagaaggacgggtaagggaagcattgcaggaaggatggccagaaccaatctgctgaaagaccgaaaaaggtctgcaattgtaattttatccctgactctgagtgtatccatatttatctgtgtaattacgattatccagagccagggtgccagaaccatggtgtccaatttcatggattttgatctggagctgagcaatgatactctgggcaaagaagatgagagccagtacagacagatctttgataaggattttataaccgctctggacgagagtaaggggataagggagatttaccctctgtatctggatgaaattacagtgccctgggagccagattttgcggagatctggatgcgggaggaatatgctacctggatggattacccctatgcggaggcaagggacgagtataagaagaatccggataagttttattcttatatcacagggatagatgagatgctgtttgaccggctaaaggaaactctttcccagccagtggacaaagaggcctttatgacaggggaagtgtgtatcctctacagaaatgacctttcgcttaaagaaaaggatattgagggaaagacactgacattctacctgaaaaagacaggggaggagggcagtgtgacgcttcccataggaggaatgacagatgagaactattattcaccttacgccggtcttgcccctgtgattatcgtaagccaacagtttctgcaccgtctgaatccggaggcatatatacagaaactgggaatcttgtatcaggaggaatatgacgaatctgcggaggcacaggccctgggcattgccgaagaaagtccttacagtacagatattgagagcagctcaaagatagaaagtatgaaacgtgtaaaagaatctcaggggaatatgatggaattcgggctgggtattgttttgattctggctcttattggaattatgaattatgtaaatacagtgtgcagcagtatacagaaccggctgggggaactggctgttcttgaaagcattggaatgacagaacggcagatgaaaaaaatgcttgtgcaggagggacttttatttgccggaagttctctgctcttatcctccacagtgggcattggagttacatatgttatctatcagtcagtgaactacatggatgtggggttctatttcccgttaatcccagtgctgggggtctatgttctggtaatcttagtgtgtatctgtgttcctttgcttctataccattacagcatccgggggaaaagtgcagttgagagacttcgggagtctcagggataaaaaaacggctccggggggtgtgcatttcccggagcctttgctgtatggagaactttctgtgttgctttattaaatcaggatatacttcagcacaaatagaatggccagtatatacattagtaaactgattttcttttcttttactttccctgtagccagattgattaccacataagagataacgcccatggcaatgccttcagaaatactgtacataaaaggcatggcaatgatgcagatataggctggaattgcctcagtgaaatcgtcaaaattaatcttagtaatagatgttatcatcaggaatcccacaataataagtgccggcgcagtggcaaaagacgggattgccaggaagataggtgacagaaacagggatagtccgaagagaatagcggccactacagaagtaagcccggttcttccaccctctgagacacctgctgcactctccacaaaagtggtagtggtagaggtacccagcacggcgcctacggaagtaccaaccgcgtctgccatcaaagctcccttaattttgggaagttttccgtctttgtccagcatatccgctttggatgcaacaccaatcagagttccaagggtgtcgaagagatccacaaagaggaaagcaaatataattacaaggaaattcactgaaaaaattcccttaaaatccatatgcataaaggtaggagcaagactgggcacagaaagaccgcctgcaaagctggggattacactgaacattcccagttccgcgtcaggtacataaagccctgtcagctcacagataattcccaggacccatgtggcaagtataccccacaggatattgcctttaatatttttagctaccaggatagctgtgatcaggacgccgatgagtgccagcacaactgtgatacctatggaacggaaggtgccgtccccaagtgcacccttaaaagaatagacagagaccaaagtggcgctccccacaacaattttcgcgttctgcagaccgataaaggcgataaaaagcccgatacctacggaaactgcgtgcttcagattcataggaattgcattaaagatagcctcccggacattagtgagtgataatatgataaaaataataccttctgtaaatacagccgccagagccatctgccagctatatcccatctgcatgacaaccgtataggcaaagtaagcattcagccccatacctggtgccagtacaaagggataattagaaaaagcagccatcaacaaagtagcaatcagggccgccagcgccgtagcggtaaaaaccgcgccgctgtccatccccgtctcccccagaatattagggttcacggccagaatataggccatcgtcataaatgtagtgatacctgcaacaacctctgttttcaccgtcgtgtggttttctttcaagtgaaaaattctttccaaagcattgcctttttctcctgaactcatattcaattttcctccattcctccatcgcctgaaaggctacataatgtgtactccgcactctggaaaagccgctgaagcctttttaggggataaaaaagcaataaaaaaaccaccggtaagttcctttatttccacaacggcatagccagtgaaaacttataggcaactattacggtagttggtagaaacgcccatccaattatgggtatatataagttctttgtacgaaatattcaattgtgaccaattggtactataagaaccataccatattgcacaagagttagtcaaggcgaatgtaaaaaggggacgtgttccttttagaaagaacacgtcccaaaatcaggcaggggtgtccccaaatggatcagacctgtcccttgtgttttcccctacacagtgttatcttttacttagaaatggattcatacaatacgaataactgcggaggaaatgttatgaagtttatggaatcggaattgataaggattttgagggaacagggagcatccctggttggatttggggatatgagcggctttgggacgggagatatgccatatggcgtatcgattgccctgaagcttccaaaagagattgtaaggggaattacccacggacctacccgggaatattttgatacatatcataagtggaatgcaaggctggacgctctggcacgtcttggggccgactatctgaaaagctgcggatatcaggctattggtcagacctctgatgttgtgaagcaggacagccagtaccgtacaaagctccctcataaaacagtggcagttcagagcgggctggggtggatcggaaagtgcgctcttttgattactaaggaatacggcagtgctgttcgtcttacttccatactgacggatgcacctgtaacctgcgcttctcctgtgactgcatccgcctgcgggtcctgccgtgcctgccaggatgcctgtcccgggacggcggtgaaaggtgaggtctgggagccgggaatagccagagagaggctgtatgattttgccagatgcagagatgctgcaaggaagatttccggggagaatattggggaggatataacactctgcgggaaatgtatagaggtttgtccatacacccagaaatatataaagagatgaggtcccccccggctgtcaaagatacagccgggggtattataatggtttttatctgctgatatgtctgcagtaggagaccacagtgagcaggagaaacaaagggatttctatggctgctgcaatgagcataatttgtcctggcaggaagctggcatctcctagatgcaggaactcaaagctgattaatgtataaaaaaagctgttgctcatgcctgttcccccggaaggcagcagacagcggatccatttggtagcctccccgccgaagaacatgtacaaaaatgagggagctaccagaaatacaatggacaaaccgatggctgtagtattgctgcggcatttggaggacagaaaaagggtgaaacttacggtagctaaaagagttaaaaagcctgcaaagatcaccaggttctgtacctgtcccagattcagggcagtcagacagacggaagactcaataatctgcagggacgttttcctgcattcccacccaaaggcagtgttggagattaatgaaaatattccgatacaaacagcaaaagttactgtaaaaatcagcagggcagaggaaattttaacaaccgcaaggcgcagttttccatatctggtacaccggatgatatcgtccgcccctgtctgatagtctgccgcgaacacagttgaggcgataaatgtgcagataagtatcagcagaaatatgcaaagccctacgtattcaagtgcattggaatcgtatccgggatagtattcgtatggaaaggtaaccttttcaaaaagtgaatcggcaattttttgtgcggagggatagtctgtttgctccattttcataagctccttcagatgaacaggacactgttcgtaaaagcccagtgcatcttcactgcccagcgcggaggcttctttggctacgcccgtctttggatcgacatagacttcccgcattctcataatcagagaacccaaaggatagatgttttggttgtagatgtccagagaaaagtcgggatcattaatgtctccataggcattttccgtttcctgatattgcagaagagcacgggagagcaattccggtgtgatcacgccggaaaaatctttccggctttcctttttcatctgaatggcttcaagccctgtgatcgtgacctcctgcttcttatcatcaagatacgtgtatgttacaaaggatacagggaagtatgccatcaatacagagaggagcagtgcagcaggcagcaggattcttacggaacgtgtcttcagcacacgttttaattcagccttccataaattcatgcttcatatcctcctctctgtgagtatcctgcgggaaaagccacaggtaaagatcctccagcctgggggaagcaggcacagagcagggcagaacaggatcatcggaaatataacgaacagagattttatgtccggcttcattgcgcagattgacaattctgttctctctttcatatttcagaagctcagtgtcagggattgtcccgttccacactcgtccctccatttccagtaccagttcctccgtagtgccttcggcgataatacccccatccttcataatggcattgcaggtggcaatgtactcaacatcggatacaatatgtgtggagataagcacaattcgatcctgggcaaactctgaaagaagattgcggaatctgaccctttcgcccggatccaggccgctggtgggttcgtccagaatcagaacctccggatcattcagaagtgcctgggcaattcccacccggcgcttcatgcctccggaaagtttgacgattcgttttttccgaacatcactcagagaaagagtatccagcagcagatctattttctcccgtgttttctgcctgcttagaccctttaatgcagccatatattccagataatcctttaccgtaaactccggatagaacccaaattcttgggggagatatccaaatatactgcggtagctctctcccagatcccggatatctattccgtcataggtgatcttgccggagctgggaaccaggatgcccgcaatcatacgtatcagggtggtttttccggctccgttggcccccagcagcccccagaccccgggggttatccggagggatacgtcatctaccgcttttttgtcctgaaaattcttcgataaatgttctatacataatttcataaatagtacactcctaatagttattgtatcagccgagacgaaaccgtccttctataaaacggtcccttcggctgatggtttttatctgccacatacagaacaatagcagaatcagacaaaccattccccatccgggggtgaaggtgtgtccgtaaaatgctggctgccattttttcagatagcagagtcccgctaacagacaggcactcatagcgcttcccagataagggaagaaccggtatgccatatgggccaggattgtcaggtatccgctagctgtcagtaaaaacgggaccagaagatacaaaagaattccacccggtgacagtccggatttttgaactgcaaataataaaagtgctcccagcatgactaagtctccggatcctataatgcatagtcttgccagcaggagcctggatacagagaagcgtgtggccgcctctgtctccagcatttgaaaccggacagaccggtaaagcatgggcactgctgctgtaaggaggatgacagaacaacacccaaggagaaatggaacgaaggtcagccttgtaataccagaacgtatgttataacctgtatttaccaaaaggcacagcaggaataaaagaagggcctgggagaaccacaccctttttcccagaaacgcaatctgcctgagcagaaattctccaaaagggatactttggcgttgtgtacgcactttatactcctgcctgaccaggggcagtatccgggtaagagcgtccctgttatccgggtacctcttacagtcctggagagaattgcggagtgtttgtttgagcggctttttcatggatagtaatctcctttccctatctgcttttctaaagctttcagagcagctctgagccttgactgtacggtccgaaggggaaggtccagtactttggcgatttctctaagcgtcagctcctgggcaaagcgaagcagcagaacttccctctggccatccggcagacgtgctgtcaacagtctcagatccacatcggattccacagtttcaaacgcagcttctgtatatgcagtaccctcactcaagggagctgagggttttctgctcctccatatatccttgcaggtgttggaagccaccttatataaaaaggcacggaatttgccccgatgggtatactgatccatatagcggatgaccttcagaaaggtttcctgcacagcatcttctgcggcagccctgtcgggggtgtgccatatacagtaccgaagtatttcggggtagtatccttctattaactcttccagtccgtccgatgtaccagactttagatcctttaaaatcttatcttcacgcgtcaagtttatcctcctaagggcgtccccttatatagtagaacgtatgggggagctaaaatgatttaaaaaaataaaaaaagagtccggcaaggcggacttgcgccggggaggggccgcttggggccatttacctttgtaatagaaagcagctgcaaaaggaaatggatccctttgcagctgccatacttgctgcacaccgtttatgtggggctgaccacgacacgatttccttttgcaaggaaaatctgaaatcggaataactcagaagaagcacaaagcttatccgcacagctgataagccaggcctcacggcttctgggtaatggccccagcggaaacatatgcgataaaattgcgaggcgctctttctctgagatatcaaagcggtcagcactgtttttggccgcaacttttggatggtagaaggcctggagttcttttgtatcccgcttctctccaaagttatataagaaaaagtcatgaagcagacctgcccgggctgctgcagcggcgtcgcagccgaacctttttgccagcagccaggagacgtatgaaacgttcaggctgtgcatgaaacgtgtagttttcagatgctgcttatagtagttcaattttttgaattcggcatcatccagaatacattgcactatttccagaaactccgggtcaatctcctccgacagtgtaatatccatcggcaatccctccctttcttttttatataattagtatgaaccggtgaagtgcgagaagtcaatggatttaatgaaaaaataatattttacacataaaataagcaacacgattaagatggaagatataaataggtataatgtagaaatagatagaaaattatggtaaaattatcatagcattctttaggacataacagggagggtggagtatatggaagcaatgaggccggtaaaaatttattcagcagctgacaaagttgaagcggggattctgatgaatcttttggagggaaacggcatttcgtctttcaaacaggggcctgggagcggcgggtttatggaaatcgaatatgggttttccatctatggacaggacatttatgtagacgaacaggacgcagagagagcgatggaattgattcaggaagttatgaggaatgtagaagtcccggacgagattgaagaagaagcagaagaggaggagaaggcagaaatacaatatagaaaaagacacagcagaaaacagattatctttattcgtattctagtagtcctggcagggctcgacttattttttactctgctgtttaatcttataaactagaatcagatgcttttataaatggaacaggaggaagtatatatggacatatttgaggcattgtcttcaagatacagctatagaaaggaattttcaaatgggaaaataccggatgaaaacatccgcaggatagttgccgcgggtctaaaggcaccttcagggtgcaactgtcaatccacaagctttgtgatagtgacagaagacagtctgagagaaaaaattgcagaaatactgccttctaaggtgaccagaacggcacccgtaatcctagtaatccttacagaagaaatcgttacccccacagggcagacctttgaactggaagattacggtgctgctgtagaaaatatcctgcttgcagttactgctctggggtacgccacagtctggctggatggaatgctaaaactggatggaaaagcagaaaaaatccacaggctgctgagcgtgccacaggagaaaaccgtaagagcgatattgccaataggggttccaaaggagactggagttcccagggagaaaaaaagctgggaagagagggtagtatacaataaatttgaataagggacagaccagttctaattggggacaggctgagtatatttggggacgtgttctttctagaaagaacacgtccccaaatatacttccccaacaaaattcgtatcaaacatttcctgcagtttatctaaatcccttgtcttggtcagtgcccacataagctttaccgcagcggcttctgtggtcatgtcatggcaggggattactttgcgctccaggaggcgctggccaatatcgtagatggacaaatcacaccgttcgtaagtgcattgactgcatacggccacggcgactccttttttatgaagcatttccagcttgtccagcaggtttcgatgggcgtagtgcagtcctccggcgccgaatacttccataacaacgcctttgtagccgagctgaacaatcatgtcaaagacttcgggctttgtccccggcagaagtttcaggagaaaaacgtctttgcagagagcgggagtaaactgcaccggacggtcgttatccagacaggaagtgctggtgcggtatacccgcattccgtcggcgaagacctctcccatacaggcagagtttacgctttcaaaagcattgaatccaagagtactgattttgacggcccgggttccgttgatgattttacggttaaaggcaacggtaactcccagaatcccattttcaattgcagcgacagcagtatagagattggttttagcatctgtcagcggattgtcgataggtacctgggagccggtaaatacaatacttttattaaggttctgcagcataaaactgacagcggccgcggtgtaagccatggtatctgtgccatgggtaacgatgattccgtcataggagggaagtgcttcgtatatcctcccggctataagctgccattcttcgggctgaatgttagaactgtccatattcagaatttcctcgtggtgaatgttgtgcttatgattcaaatctgcaacatgagaaagcagactctgagaggagatcgccggaatgagacctcctacgccctcttgtgaggcgatcgtccctccggttgtgagtaataaaatattcataatggggttcctccgattcttttcatagttagaatctcctgataagtaagtattatgtatccttatacatagagcaatgcggtataacagaccaaatggcatacagctgcgtataatcagagatatgaaacactgcactagacatattgtacaacaaaaaagagaagagaagaaatcgtcatagtgcacaaataggaggagacaaaattgtgtaaaacaggtaaaatggataaagtatattgacttttttggaaatccatgatatatagtatgtataacatcctacaaaggatgaaaagagagtgggaaggagaattatatcttatgaaggcaaaattggtgggaatgataatggcagctttggcagcggcagtgtcattatcgggttgccagagttccacggagactgtactgtcagattctggtgacaatgattaccaggagatagaactggtgatggcagtcaatggaacagacattcagattgacaccagggtggcagacaaattttctgaactggtagaagaagcttccggcggaaaagttacagtggctgtgtatcccaacgatcagctggccggaggaaatgctacaaaaggagtggaaatgattgcagtagggggtgcggatttggcagcctatgccacctgcaccatggcagcccttgacaatcagctatctatagcaacgatcccctggagctttgacagctatcaggaggcgagagaaattattgattccacaggcggagaatattatgcagggattttggaaaagaagggaattacatatttaggatctttccataatggctttcggcagctgacaaacagtaaaagagaagtaaaaacgcctgaggatattaaggggttaaagattcgtgttccgggcagtgaggtctatatggacttcttccgcacactgaaggtagatcccgtggccatgagctggagcgaagtatttaccgctatccagcagggtactattgacgggcaggaaaacggtgtgagcataacggaatcagccaaaatggatgagattcagccctatatgacactttggaattacagctatgaaaatgatttgtttgtagcaaatactgatatatggaatgcgctggaaccaaagacaagagaactcttacaggaaaaggcaacagaagcctgtgagtggggacgtgatacggtagaaaaagaagaaaaggaaatggtgcagggctttatcgacggaggcatgaaggtaaccgaactgacggatgaggagttggcagacttcaaggcggcagtagaatcctccagacaaaagttcattaagaaatatggggaagaggcctgcagcgcgttccagattaagtaaacgagaaagggaaagggagtaatcttatgggtattttgaaaagaatagaagaaatattgtctgtaatatgcctgggtaccatgactgtactggcctttgccaatgtagtgtccagatatgtattcagcgcatccttctcattttcggaagaaattacaacatatttatttgttttattaagcctgctgggcacagcaatcgcggcaaaaagaaaggctcatctgggcctgactattataacggatttggtaaaccccagaatacgtaaaatcatggagattattggatatgggtttgcagtggcctttacctttgccatcttttattatggcatcttgatggtaaaaagccagatagagttagggcaggtgactgcggcaatgcagtggccggaatggattttcggttcctttgtgccatttggttccttctttgttttgatccgattcggacagaacctgatagaatccataaaatggaaacctggtaaggaggtaaaagaataatggtagcagcagtattatttataacattcgcggtacttttattaatcggagcccccatagcagtatgcctgggtgcctccagtgtgatttctatgattgttcagggagccggccggcctttggaggcgattatgagcagccttccccgtctggtatcctcttccaccagcaagtttgtactgcttgcaataccattctttattctgggcggaaatataatggaaaaggcaggaatctcccaaaaactgattcgcctggctgaggtttgtgtaggccatatcagaggaggcatggctatggtgtgtgtcatcgttgcctgtttctttgcggccatctcaggatctggtccggcaaccgttgcggcactgggactcatcattgttccggcaatgatcaaggctggttataaaccggcatttgcggcggcacttatggcggcggcgggagccatcggtgttattatccctccgtctattacctttgtagtgtatggttctatctctgatacctctatcggtacactgtttattgccggtgtgctcccgggaatcctgatgggggccgggctgttaatcacagcgctgctggtaggcagaaagacaaagctgaagacacttccgaaagccacggggaaagaacgctggcaggcctttaaggatgcgttctgggggcttttgatgccggtcatcatcctgggtggtatctacggaggaatctttactcccacagaggctgcagcagtctccgcggtatacgggctgtttgtaggaattttcatttataagaccataaaactaaaagaattatatgcgattttagtggactctacgtcaacaacagctaccgtaatgttcataacagcggcagcaagcttatttgcatatgtccttacgagagcaaggctggatgttgccatcagtacagcgctccagaatgcaacaggtggcaacgtcatagtattcttcctgattgtaaacattcttctgctgattgcgggatgtttcctggactctacctcagcactttatatcttcacaccattgttcgtaccggttgcccaggcactgggagtagacatggtacatctgggcgtggttatgattgtaaacctggcaatcggactgttcactccgccggtaggtgttaacttatatgtagcctgcggtgtaggcgatgtgaacctgaaacagatatcaaaagcggtggttccgctcctgattacttctattatagtgttactattaattacctacataccacaaatttcattagcattggtatagaaagaggaggattgcaatgagagatgtaagcgtaaaagaattggaaaaacagtgtattgagctgaaaaaaaaggttttgaccatgatttacaaagctcagtctggccatccgggaggctcactgtcagcagctgattttgtaacagccctgtactttcgggagatgaacctgaatcccgggaaccccaaatgggaggacagggacagatttgttctgtccaagggacatgtgtgccctatccagtatgcggcgctggcaacactcggctattttgacgagaaggaattggatacacttcggaaagaaggatctattctccaggggcatccggatatgaagaaatgtccagggattgatatctccacaggatctctgggacaggggcttgcctgcggtgtaggtatggcagtggcaggcaaagcggatcaaaaagagtaccgtgtatttgtggtggttggagacggagaatgccaggaaggcgaaatctgggaggctgcacagacagcaaataaatatcagctggacaatctggtggtatttgtggacaataataaccttcagctggacggaactactgatgaggttatgccgaatatcaatctcggcaaaaagtttgaggctttcggctttgaaacattaactattgacggtcacaatatggaagaaattgtagctgcactggataaggtccgggctgctaagaacggaaaacccaaatgtatctttgcaaatactgtaaaaggccatggaatctcctttatggaaaatcagtgcggctggcatggagtggcacctaacgatgcgcagtacgagcaggctatgaaggaattagaagaacagctgagtgctatttaatggagggattaaaatgagcgaagtaaagaaagcaaccagagatggattcggagaagagatcgttgccctgggaatacagaataaagacatttatgtggtggacatcgatataggaaaatcctgtaagacaggcaaattccgggaggaacttccaaaacagtacttcaatgtaggcattgcggagcagaacggtgccggagtggcagcgggcatggcaacctgcggcaaaatcccctttgtggttacctatgcagtcttcggctccctgagaatgtgcgagatgattcgtcaggagatctgctatccaaaactcaatgtaaagattgcgtgctctcacgggggagtgacccctgccaatgacggagccagccaccagagtatagaggatatgggggtactgcgcactattcctaacatgactgttatcatgccggctgactattacgctgcgaagacgctggtaaaaaaggcagcagagatggacggcccatgttatctgaggtttaccagggatgcggtccccgtaatatacgatgagaatacggaatttgaaatcggaaaggccaatctggtaaaagacggaacagatgttgcgataattgcaaatggagataccgtaaatattgctgtaaaagcagcaaatgagctggaggcaaagggaatcaaggcaaaggtattggatatgcataccattaagcctctggatacagaagcggttatggactgcgtggaaaacataggtagaattatcacggtagaagaccacaatattatgaacgggcttggaagcgcggtctgtgaggtagcttcagaggcagggaaaggcatagtcaagcgtgtgggcattcaggatcagttcggccagtctgctccttacgaaagactgctggagatgaacggaattaccgtggagaatatagttgctattgcagaaaaactcactaaataataagttttaacatcctacatattatataggatagaaaggaagcgtaagaaatgttagactttaacggacaggtagtaattgttacaggaagtggttcaccaaaaggaatcggtaagaccatcgctcttacctttgccggacagggagcaacggtggtagttgccgatatgaacagcgagggagtgaaagcatcggttgcagatatagaggcagccggaggaaaggcttttggaatcacagtagatatcacatctccggaatcggtacagtctatggcagatactgttatggataggttcggaaggatcgatgtattagtaaataatgcaggcatctcccaaaaggtcacagtagaggatatgacgctggaggatatgaagcgaatctttaatgttaatatgttcgggctatttttgtgtacccaggcatgtatgaagcctatgcgggcggcaaaatacggcagaattgtgaacctttcttcagtatccggaaaaagaggcggaggagtattcggcggcgcccattattctgcgtctaaagcagcagttctcgcattctctaaaaatctgtccagagaaatatcgtcagaagggattactattaacagtgtgtgtcccggattaatcaatacagagatctggaagtctcttcctcaggaagcggcagataagattatcagtgatatccctatgggacggccaggagaaacccaggaagtagccaatgccattgtcttcctggcatctaaggaagcgtcctatattacaggagaagaaatagatatcaatggcggttcccatatggattaatttctcctaaaggaagaacggggtgtgtactttttagcaaaggtacataccctcttcttgatctgccccaattccttctgataaataattgacaaattcaatggattgctttaaagtaatatgtatattataggatgtagcgacataaatcggaaatggagagttctaattatggtagaacgggcaagttatttaaaaagactgaacagcgaatccgtggtgcagagggttattaactgtctcaccgatgcgatgctgacaaaacaattaaagccaggagacaagatccccacagagatggagctgtcagaatcattgggcgtgggacgcaattccatacgcgaggcaattaaaattctggtatatctgggggtgctggagatacgcagagcagagggaacctttgtctgtgagggattttccgagagcatgattgaccctatggtttatggaattatcctggataagacagacgactacgaaaaccttatggaactaagagaattaatcgaggtaggggtggtccacctggcaatgcagaaataccaggaaaaagagctgaaggatcttgagaaccacttatttgttctcaaggaagaaattcaaaagggtctgggaaatatagatgctatctttgaagcagataatcaattccatgatgccgtatcggctatgggatacaatccactggtcgataagattaataaggtagtaagggtgctgactcacggggtacgtctggatacggtaacaaggatggtagaaaccggaaggggtatggaattgtatgaagcccatgagaaaatatactgtatgctgctgaaccgggacgagaacaatattaatgaacttataaaagggacatattttcaggagtagctgaacgaacagaggcaatgtttggtatatcaatagatctatggatcgctgtaaaatgaaagcttttcagcggtccattttgttatgtatttaacgatctgtagatccagattatttagctaccattggtacaaattataaaaagtcacgaaaagcatttgctgtggacaattagttttgtgtgatatatactaaaaatacgaaatatctgtctgtgaagagcgatgaaattgactcgggataaaatgcctggtcgatatagaataatttgatattaagcgaaaagaggcgaaactatgggaaaaagatatttatctccaataaatacaaaatcaatggtgcagattgtaatagaccggatatcaggtgccattatagatggagaattgaggccgggggataagattccaacagagccggagcttagtgccatgtttaatgtagggagaaatacagtgagagaggccattcggatcttagtggcatatggggtgctggagatacgcagggcggaaggaaccttcgtatgtgacggattttctccacagattataaacccggcaatctatcagattattctgcagaaggaaaacagttatgacgaactgatcgatcttcggaaaataattgaaaacggcgttatgcagctgttaatggaaaagaaagtatcccaggaaacctggaataaaattggctgtaaatgtgatctcctggtgaaggaactggaaaaagagacacccgatattgccaaagttgccgatgcggatattgattttcatgaggagatagcaaaggctacgaataattctctggttttagtggtgcatgatgttattgtgcagctgacgagagaatcaaggtaccataccatagagcgggtaattgccaaaggagataagcagtatctgatttacacccataaaaatctggtggaaaaacttcagggagatgatattaatgccctgtatgcagctataaatgacagctatttttactggaaagatatataccgctgatacgtggaccgggagagggtctgaagcagcctgtaagtgcaggagcttcaggccctttcatagtatgagggggtgtctgtgcgaggaaccggcggggaaggaatgaaatgacgaaaggagagcagaaaaataagcggagaaagtaaaataataactaaaaatatagaggaaaaatagtgcaaagtgtaaaatgtgaataaatacattgacattccaggtcccagatgctatatttacgtcataacatcccatgttaggatgaaaggatgcaaaaaagaaaaatgtaaaggagaagcgtatgaagaaaagagtagtttgttcaattttatgtgcagtcatggcaattggtttgatatctgggtgtgggagcagttcgggagattccggggaaaccgatgcttctgcggggggcagcagtgcagaagcagtggaaggtgattttgatactgtcagtctgaaattgagctgcaatggaacagatactgcgaatgacacaaaagcagcaaaattatttgctgagaaagtgaatcagaaatccgggggggaaataacggtaaccgtatatccgaacgaccagctggcgggagggaatatgtcaaagggactggagatgctgtgcgacggaaccgtagatctggatgtacactcaaccagcattatttccaatctggacaatagtctcatggtgagtacactgccctggctgttttcggattatcaggctgcagaggatgccttttacggtgcagggggagagtatattgattccgtgctgcagaagaaaggggtatattatctgggcgctgtacataatgggtttaaagctataaccaacagcaagcacccaatagaaaaacccgaggacttgaaagggctcaaaatccgtattcccggtggagattttttcagtgcattctatgaagcttttggggcatctccccaggctatgtcatggtccgaggtatttaccgcgctccagcagggcacgattgacggacatgacaattctctaagtactattaattcagcaaacgttcaggaggttcagaaatatatatctatttcaaagcatacctatgaggcatttacattcatggctaatgcaaagaaatttgatactttgagccaggatacgcaggacctgatccgggaatgtgtagaagaggcaacaaaggagatgaacaaggagattgcagaagaagaagctcagctggagaaaaagtttgaggaagaaaacggatgtgagatttatacattcacagaagacgatattactgctttcaaggcagtagtacagccactggttgatgagtataaggggatatatggttcagaagcctgcactgccttcggtgtgaaatagaccggcgggcacaggagcggaaaagctgaccaacatgtgacgtgccttgcactggctgaaaaggagtagtagatatgaaaaaattcataggagaacttgaagataatttttgctcggcgattttgctgatcatgactttattaacttgtattaatgtatttgccagatacatatttcacagttctatgccatttgtggaggaactgacctcattaggattagtaattatcagtttaacaggtgccgcagtagctgcaaaaagaggggcgcatctgggattaacggttttgacagatttgctctcaaaagaaaaacaaaagtggttcactttgcttgggcatttgcttggggctgtatttggaggcgtaatgctctattacggagtgcttatggcctaccaggagtataccctgaagcagacaacagcaggaatgcagtggccggagtggctgttcggtatgtttatccccatcagcggtgtagttttgctgatccgttatattcagctgtttatacaggtttataagagaaaggagaacaaagaataatggtagctttgatcttatttggatccttttttatactgcttcttctaaatgttcccataggactttccctgggtgtgtcaagcattctgacgctgctgtatgagaatctgccggtttccatggtatccagcaatttatattcctcaaccagtaaatttgtattactggccataccattttttatattaggcggaaatattatggaaaaaagcgggatctcccagagactgattgacttctgcagaaccctggtagggcacaaaaaaagcggaatggctatggtttgtgttattgtggcatgcttctttgcggctatttcaggttccggaccggctactgttgcggcgctggggatgattattattcccgcaatgacaagggtgggatacaataaagccagttcaaccgccttaatgtcaactgccggggctatcgggattattatccctccgtcaattacatttgttatctatggatccattacaggaaactccgtaggctcactctttgcgtcaggcattgtaccgggcatcttaatgggggttatgctggtaattgctatggtgtgggtgagccggaaagaagagctgaagctattgcccaaggcaacaggcaaagaaaagtggacggcatttaaagatgctttctgggggcttctcatgccggttattattctggggggcatatacggagggatctttacccccacagaagcagcagcagtgtctgctgtctacggattaatcgtgggattgtttatctataagtctattacgttaaaagatattaaaagacttttggctgactctgtatcacagacagcagttgtcatgtttattgtaggaactgccagcctgtttgcatgggttctcacggttacaggtcttgccgcttcagccagcaacatgctgattcaggtaagcggaggaaacaaatatatcttcctgctgattatcaatgttattctgctaatagccgggtgctttatagacgccaactcagcatcgtatattttagtgcctattctttatcccgttgctatttcgcttggcatcgacggtgtacatctggggtgtatcatggtaatgaatatggccataggactgataacccctccggtcggggtaaacctttatgtgggctgcggtattgccaatgtatccctcaaggagatttcaaaagcagtattgccttttgtagcggcatccattgtagcgctgcttttgaccacatatattcctgtactgtctatgtttttgccaaaacttcttggctagttcaggtgaatattgaaaactccaatgtaagctggatatccaagacttgcattggagtaagagaaatttttttgatttcaaacatcccatgttatgatgtttgaataatagatgacgaggtgaaatgtatgaaaaatatgagcgtagaagaattgaaagagcaggcaaaggaattgcgaaagacagcactggctatgatctatgaagctcagtcaggccatccggggggtgcattttctgcggcagaccttataactgctttatactacagagaaatgaatcttgatccccggaacccgaaatggtctgacagagatcggtttattctgtccaaagggcatgcatgccccatccagtatgccgccttaggaagtcttggatattttgacagagagattttccacacacttcggaaggaagggtccattctgcaggggcatccggatatgaaaaagtgtccgggtattgatatctcaaccggttctctgggacaggggctgtcctgcggtgtgggtatggctctggccggtaagagagataagaaagactaccgggtatttgtaatggttggggacggagaactggacgaaggccagatctgggaggcggttatggccggcaatgcgtggaacctggacaacttaaccgttatgatagacaataacagcctgcagctggacggaacctgtgaccaggtgattccccatctggatctgacgaaaaagtttgaggcctttgggtatgagacctacgagattgacggaaacaatatgcaggaagtagtggataccctagataaaatcagggaatccaaaacgggaagacccaaatgtataaatgcccataccatcaagggaaaaggtgtgtcctatatggagaatcagttgggatggcacgggatggcgcctaatgaggagcagtataaaattgcggtggaagagctggaaaggggattttagatatggagacaaagaaaattgcaacccgggatggatttggagaggccatagcagaactgggaaaagagaacaaagatatctatgtggtggatattgatattggaaagtcctgtaagacaggagagtttgcaaaaaagttccccaggcagcatgtgaatgtgggaatagccgagcagaatggtgcgggcgtagctgcaggtcttgccaccactggaaagatcccctttgtggtaacctatgcagtattcggaagcctgcgtatgggagagcaggtgcgtcaggagatatgctacccgaatctgaatgtgaagattgcctgctcacacgggggactgacaccggccaatgacggagccagccatcagagtatcgaggacatgggggtctaccgtaccatccccaatatgaccgtgattatgccggctgattactatgccgccaaagcattggtcagagaagcggccaatacctatggacctatgtatctgcggtttaccagagatgcggttcctgtaatctacagcggggagacaaaattcgaaatcgggaaagctgtgcgtctttccgagggaaaagacgttgctatcattgccaatggagatacggtttgcattgcactgaaggcaaaggatattctggaacagagggggctgtctgcaagagtgctggatatgcatacaatcaagcctctggatacggatgctgttatgagctgcataaaagatatcggcagaatcataacggtagaagatcataacatattaaatggacttggaagcgctgtctgtgagacagctgcagaagccggaggggccagggtaaaacgggtcggtgtacaggataggttcggtatgtccgccccctatgaacgccttctggaaatgaatggaataacggcagaacatatcgcagatctggcaatggaagaatggtagaaaggaaattttaggtatgagggcaggattcatagaaaaaccgggagcagcttattttaaagaagtagaggaacctcaaatcgtaaatgatacagatgttaagattcaggtgaaggcaacgggaatctgcggttcagaggtccatgcatttcatggcaaacatccctttcgtatcccaccggtagtgtccggacatgagtttgccggcatcattgtggaagtgggaaaaggcgtcacaaaatataagcccggagaccgggtgacggcagaacctcaatatggctgcggagagtgcccagcctgcagagcaggcagatacaatatttgcagggataaaaaagtactgggatctaatggatggagcggctctttcggagaatttgttgtggttcccgagaagacaattgtgccgcttaaaaaggaggtcagctttgagcagggcgcattgatcgaacctatagcggttggtatgcatgcggtaaggcagaatcgtatctctatcagtgataccgtgctgattataggggcagggacaattggtctgggcatactgttaagtgtgagggcctgcaatcccagatgcattataatgacagatgtggtggattttaatctggaggcagcgggcaagatgggctgcacccatgttatcaacagcacaaaagagagcctggaagaaaaaataatggagattacagagggtaaaggagttgacataacatttcttgcctttggcaacggaccggtggtggaggaggcggcgaaactcactaaaagaggcggagttatctcagagatagcacttatgcaaaacagtgagagagcgccctatgaacttatccagagcaaagagatctccctgatagggtcaaatatgtatacctatgaggattacatggtagtggtagactgcatggcaaagggattaatagataccagccagtttatcacacagagatatcccatagaaaagatgcaggaggctatggatatggctgacaaaagacctgagccggtgattaaggttatgctggagttttaactgtcggagacaaaaagataccctcattagggggtgtctttttgtctttgaaattataaaaagtgttattgacaactgaagataaccgtgatatattaagcatatagattaatcgtttaactaagtaattagtattaaaaaaataaatatgaacgaataatatataaaagttgcacaattaaatctattttttttactttataagttaatcgattaactcaagagggagggaagctgttatgaatatgaaggagattgccgagaaggcgggtgtatccgtggcaacggtatcctatgttctgaatggtacaggtaatgtgagccagaaaaagcgggaagaaattatgcagatcgtcggagaggaggggtatgttcccaacagaatagcaaaaagcctgagaacaaagaagagtaatacgattggcatcatggtggaggatatcacagcatttcagactcccagaattattaatggaattaatgagtatgcagagcggcatggatatactgttattctaaatgacatggggctgctaaagcgtgtgggaaaagattttgagtcaatcagccggtataaggagataatagaaaagggctttcagatttttgaacgggcccaggtggacggaattatttatgtggccctccatgacagagacgtgtcacagcttttaaaaccggtaggggttccttttgtccttgcctattgttatgacaccggcaaaaaaaattattacgtgacctatgacaataagaatataacaaaaaaagcagttcagcacttaatcgccaacaatcatacagacatcggattaatctgcggggaggaatcgtcaaaaccagcgcaccagcggtacgagggattccgggaagccatggaagagaatcatcttaccatcaacaatgactacattttccccggggattgggaattcgaatccgggaggttggcttatgagaggtacaaaaaactgatgagcaaaccaaccgcgatttttgctatgaacgatttgatggcagtagggtttatagacgccgctctggatgacggggtaagaattccggaagatgtatctatcattggattcgataatcaggaagtatgcaggtttacccgtcccaggctgacaactgtggatctgcctctggaagccatgggagatgaggctggccggctgcttctgagtctgatccataaggagaaggttaaggagaaaaaggtagttctggactgccggtttgtggagaaaaagtctgtagctaaaaggtaaataataaacatatgtaagcaggaggtattttatgaaaaggaaactgatgtgtctggtaatgggaatgacaatggcgtccatgctgttttccgggtgtggggataagcaggaatctgacgggggaacagccaaggaacagacaaaggaagagggaacggacagtaaaagtgaaaaaggaaccaagcttgttataggtgcggaagccggggctccaaacattgctttctatcaggagcattcaaaggaattcaccgaagagacggggatagagatagagtgggtggagatacctcatgataatatgcatgagcgctttgttcaggaagccatatccggcagcggggcaattgacatctatgatacggatcagccctggatatcagaatttgcatccaaaggttatctggaacctctgggagacaagcttaccgaagaagataagagtgacttttatcaggcagctttagatgcatcctcctatgagggcgaggtttattctataccattttttgtccatacgcctattgtgtattacagaacagatttatttgaggaagcaggcataacagaattccctaagacgtgggaggaatatgcggaggctgcgaagaagctaacaaaggatgatgtgtatggaaccatcattgaggcaaagcaggcaggtgagcctgttacccatctggtagactggttctatcagggagggggctctattattgacaaagacaataatgttactgtaaattcaccggaaaatatagaaacctttaattttcttctgaaaatgatgtatgaggacaagagcgtcatgccgggttccctgggatatgataacgcagatgtgcacaatatgtttatgcaggggaaagttgctatggtgaagaactggccctatatgtatgctatggcaaaggatccggagcagtcagcagtatcggataaatttgcagtggcagttcagcccgcaggaaaagagcaggcaaccgcggcatggacctggggattcggaatatcaaacagctctaaaaacaaagaggcagcgtgggagtttatacagtgggcgacatctcccgaacagttggcagcattgggaatagcaaataccaatccggtacccagaaactcctctcttgagatagtgaaaggtgatacttctttgacagactttgacaaggaaagtatacaggtaatgtctgaggcgttgaattatgcgtccaatgcaacggaaaatcctaattttccaaccgtgcagaatgagctttcctatacactttccaatattatgtctcagcaggtcagtgtggaagagggactgaaagaggcggagaaaaccatcaaagaagcagttgagtaaaactatatgcccacacatataaccgttatgtgtgggcattacttttagaagaggtgagtagaatgagggcagtatcagccagagaaaaacggcggaggttagcggggtactcgctgatcgctcccgcggttcttatattaatcattacgtttgcagtacctttgctttattcttttataatcagtatctcggattctaatgctattgttgccaataagtttgagttggtagggctgaaaaactatatatcggtccttcaaaactccaaattccagtcggctttatttcatacctgcttttttgtgataactactattatactggaatttatcattgggtttattgtggccctgctgctgtaccgggagacggccgggtctaagttttttaaattgatttttgcagttcctctgatggttgcccctgttgtttccggactccagtggagatggctgtttgcagaccagtatgggattattaaccacctgctgtccaaaataggtattgaggcacccttatggtttacctcggcccagacctcctgggtaactattattgtggccaatctgtggcttgcggcgccttttgttatccttgtgcttctggcaggcctgggcggactgtctgaggaaatgaacgaggcggcggagatcgacggagccaataaatggcaggtcttccggagcattatactgccccagctgaagcctactattttaattattttggtcatacgcctcaccgatgccttccgtatctatgacttaatttacattttaaccggaggaggtccggggggaaagacagaggtgctgagcacgtatatctataaacggatttttacagactgggactttggaaggggatcagcggcttcttttattgtcatggtaattatctgcctcctcagcctgctgtgcagtaagctgatgagcgaaaaggaggagtagggatgaaaaagagaacaatcataaacgggacagtgattcttcttctgtcagtctgtgccattattactatatttcctatcctgtggattctaatcacctcgctgaagacggatgtgcagatgtttgctattcccccggatctcctccccaagccagccactctgaagcattaccaggaggttattgtggaagggaattttctcagatatctttttaatagtatcgtggttgcactggtaagctgcggtatttctatggtggtggggatacccgctgcctatggattcgcaaagttctccagccgcagtataaaacctgtcttcggggctgtgactgccgtgcgtatggtcccccaggtagcaatggtgataccattttttatgattatgaggaatctgaagctgagtgatactgtagcaggtcttatcctcacctatattccatttgagctcaccctgattatctggatgctgaaaaactttttcgcacagatacctaaggaggtagaagaggcggcagagctggacgggctgggcgtctggggaacgctgattaaggtagcggtgcctctgtccaaatcatccataggggtggcaggactcatggcgtttctgttttcctggaatgaattcatgtttgccctgtctcttacatcaacagccagggctcagacattaaccatagggattgcgggatatgttacttccttccagacattctggggagccatgtctgcaacgggaatcctgtttatgataccggcatttatactgacaataattttccagaaggatttagtaaaaggtctgactgcaggagcagtgaaaggatagagctatgcgtataagaataaatgaaaagagaacagaaataagagattcagaagaaatggttgtgggaaccataaccaatccggtgatttttgaactctgggacggatcccaggagaattctgtgattcggacggaaacctcataccaggaggtggtatatggaacagatggagtgacggcatctgcagtcctggagaacgaggcggcaggaagaattgtgctcacggatcagtacagcgaagacaatcgcggcattttgctagagcggacagtaaagatcctaaaagcaggcggcaaaaaggggatccggcttttgctggaaatggatctgtttccggaggaggagaccggattcggaggactcaggtactttgcaccgccggctatctttgacaagaacgatctggatgaagacgggtatgaggattattttcatacacagaaaactatattccgggatgacagatttaactatcctgcttttatggcattttcagagaagcataagaaggccgtccgcctggagcgtgcgccgcttcctgcctatgactctaatccggaccggggcagccagggaagggacgcattatttttgcagaaaacagacataggaagcatgggagtagacggggagggagagggaaatgtgaagcttgccgcctgctacccattctatgagggggatgccaccatcggcctttacattgttaagacagttcccttcggtgctttctggccgctggaggagggagaaagctttcatgtctcttaccgtctgagcagctgcagtcacaaggactttcatgaagcatgctggtacaacgtaaagtcggtcattgacagagaaaaaccggaaccaaaagcattgctggagtctccggaggaaattgtccgataccgtctggaggcgctggataagtactatgttgaaaaaacatacgcagaggatgaaaatgagccggcaggttatgtgctgaactgccatccccaggagggacggcagctggagaacattattcagtatggatttaccggacaaaatatattaaatgcctgcaatgtactccgctatggataccagacagagaatcaggaatatatcagaaaagcgaggaaggtagcagacttttttgccgataaaattcatatcagggaatccggactgttttacaatctatacaatattgatatgaaaaaagtgaatttctggtggaccggcttacttctcccccttgcgtatgcccagggggaagaactggaggagctgatgggtcctctgtatgactatcgcagagaggtcatagatactctggtaaacctgaaaggcgcgtacctcagatgtatgaatgaggatgtgacagcgcttcttcgtctgtatcgcctggaaaaggagcacggcgttcttcatgaaaactggctggaggccatccaaaactacggggaatttcttcttacagcacaggaggaggatggcggctggtacagagcctatgatttgcagggcaatcccatcacgcaaccggaactgtggtttggaaagagcatttacgaaaagcggtcttctaccgggacctccatttcattcttagtggagatgtaccagatgacaggtgaggaaaaatatttgtcggcggcagaaaaggcgggagcttttgtaaaagaatatatcatagacaaggtgagatttaacgggggtgtccatgacagtatctatgcaaaggggcagctgatcgacaatgaaagtattttatatcctatgttcggcatgctttctctgtatgaggctacaaaaaaagaagtgtatctggaaggagcagtgcgggcagctcattatactgcatcctgggtatgcctgtgggatgtgcctttgccggaggacagtacgctcagaaaatatgggtttaacagtataggaatgggagcctgcgatacctgcggctgcggatatgttcatcccttccagctcatgtgtgttgccgagattgcgcagattgctgtctatgcccaggatccggagctttttgagaccgcacggctctactggctggggtgcagccagacagtagctcttccggaaaacgactggggctatgcagaatatggccttcaggaggaggggtatctggtgagctggtgggcggtagatgatcctatgttcagcggtgacaagggctttggccacaggtggaaaggagagggcaataagacttgcttcccatggatcaatgctgtgggagtaaaggcctactgggctctgctggatcgcttcggaactactgactttgaacagatacgaaataaacatttcagctaggagaacaaaaatgagactggagacaattaatctttcagatataaagatagaagaccggttctggacaaaacatattcatttagtaaaagacgtcattcttccctatcagtgggatattatgaatgataaggtgcctggggcagagtccagccgctgtctggagaactttaagatagcggccggccggatccagggagaattctacggagctgtttttcaggacacggatatagcaaaatggatggaagcagtggggtattccctgtcttccgggagaaaccaggaacttgaggcattggccgacggtgtggtagaccttctggcagaggcacagcagccggatggctatatggatacttacttcattatcagagagccggacaaaaagtggaaggatctgtgcgaggggcatgaactgtatactgcgggccatatgatggaagctgccgtggcttactacaacgctacaggaaaaagaaaattcctcgactgtgttctgaagctggcggatcttatctgcgaaacctttggtcccggggagggacaaaatcacggatatcccggacaccaggaggtggaaatcggcctgataaaactgtatgagactacaggaaatcggaagtatcttgacatggcaaaatattttctggatattcgcgggttaggggagaactactttctgaaagagcagaagtcaccgggctacctgcatatcttccctgaattcgaggactatgaccccaagtattcacagtcccacaagccggtaagagaacaggatactgcggagggacatgcggtgcgggcggtatacatgtactgtgccatggcggatgtggccagtgcttacggggatgaagcaatgctggaggcctgcaggcggctgtgggataatataacggaaaagagaatgtatatcacagggggaattggatcctccggaatcctggagcggtttaccacagactatgatctccccaacgattataattattcagagacctgtgcgtcaatcggcatggcgctgtttagcctgcggatggctaatattacccgggagagcaaatacgcggatgtagtggagctggagctgtataataatattctggccggggttgccctgaatggcaaacgtttcttttatgtaaacccactggaggtgattcccgggaactgtatccccagaacgtccagggagcatgtaaaagaggagcggcaaaggtggttcggggtggcctgctgtcccccaaacattgcaaggactctggcctctttgggacagtacatttatggaatagacaaagaccacatttatatgcatctttttatatccggccagagcagtttttgtgtgggaaattccaccgtcagtataggagtggagtcagagcttccctggcagggagaggtaaggatcagtctgacaggggtaccggaatcaggggtctgcataaacttcaggattcctgcctatgcccgggactacacaatatactccgggggaaggcagataccgtttgacaactgcaggggatatgcaagagtccgtgtgacagaggacacagagcttcagattcacttctccatggaacctgtgtttgtccgggccgatgttaaggtgagttctgatgtgggaaaagtagctgtgatgcgggggcctttggtctactgtctggaagagagggacaatggaaataatcttgcagcactctttgctgatacggaaaaaggactttgggaggaacagtcggatgagtttgggggcataatcgccgtcagatttcaggggaaaaggatggtgaatagatccagacatttgtatgaaatctatgagccccagtatgagacccgggaaatacgggcaattccctatgcctactggaacaacagaggtgtgggtgagatggctgtctgggtaaaagccattataaagtaaatggtcaatacaggctgctgtaaaatgaaatttgttttacagcagcctgttttgtcacttttttattgtcgttatcagaatatgtgataaaatagaaaagaatgtagaatgatagaaaatagaaatgtggaggttggaaaatggaaagtagaaaagtgattcaggtggaagagaaggtgccttttaagatgttggtgccgttgagtatccagcatatgtttgccatgttcggggcatctgtcttagtaccttttatctttcagattaatcctgcgattgtacttctcatgaatggtgtgggaaccttattgtttatccttatcacgaagggcaaagcacctgcctatctgggatcgagctttgcctttttagctcccgcaggtattgtaatatccaagttcggttatccatacgccctgggcggctttgtcgctgtgggtgtctgcggctgtattctggcatttatcatctataagtttggcaccgagtggatcgatgtagtgcttccgcctgctgctatgggtccggtggtagctctcatcggcctggaactttcctcaaccgcagccagcaatgcagggcttctggaggaaacggtggatcctaagaatgtaattgtatttattgttaccctgggcactgcggttttgggttccgtacttttcaaaaaatttctttctgtgattcctatcttaattgctattttggtagggtatgcggcggcgctcctgtgtgggatcgtagattttacagaggtagcggcagccccctggtttgcactgccaaactttgtgatgccgaagttcaatatcagtgctattctgataattcttccggtacttttggtgacggcctctgagcatgtgggtcatcagattgttaccagtaagattgtgggcagagagcttctgaaagatcccggcctccaccgttccttattcgcggattatttttctactgccttgtccggtatgatcgggtctgtgccgactaccacatatggggaaaacattggcgtaatggcagtgaccaaggtatacagcgtatatgtcatcggcggtgctgcggttttgtccatcgcagcctccctgcttggaaagctttctatgctgatcagtacgataccggggccggtaatcggggggatttcttttctgctctacggcatgatcggggcttcggggattcgtattctggtggactccagggtggattacggcagctccaggaatcttacgcttacgtctgtcatatttgtgaccggattatcagggattgcattaaaaatgggcaatattgagctgacaggcatggttcttgcctgcgtggtaggcatgcttttaagtttgcttttctatgtatttgataaattacacttgacgaatgatcaggaggaagaaggacaggcatgattcacattgctggaaagctaagtgagaaaagaaaggaaaggggaattacccaggaggagctggcctcatttatgggggtatccaaagcgtcggtgtcaaagtgggagaccggccagagctatccggatattgcgatactcccccagctggcttcctattttaatatcagtattgacgagcttatgggatacgaaccccagctggagaaaggggaaatccgcagactgtacagccgtctggcgtcagccttttccctcaaaccctttggcgaggtctatgaggaatgccgtgaaattatacgtaagtattattcctgctttcctctgctgcttaacatggcaaatcttttattaaaccattttgcactggcacctgatccagagaccggaaggggacttctggaagagattatcaaactgagcatccgtgtaaaagaaggcagcagggatattttcctcatacgtcaggccaatgttttggaggcaacaggttatctggagatgggagagcctaaaaaggcattggctctgctgcaggataccgtaatgcccatactgggagaagaaatcctcctttcctgtgcctatgagcagaccggccagagagataaggcagtggagactctgcagatagacatgtatcagaaggtgataggactaattgccgacgcacagaagtttcttatgcttcatatgcatgaggaggaggcgttccgggaaacggtacagcggatggctgctgtgtcggactgcttccgactggaccagctgcaccctatgacaatggggaacctatactatgttgcggcgctgggatttctgtcacaggagagcagggaagaggccttggatatgctggagcggtttgctgaggtatggatacagacagaacttccggtgaggcttcatggggacgggtactttgataagctggacgggtggttcaaagaatttgacctgggagatcaggcgcccttaaacgatactgtgattaaaaagagtcttctggaggctttgtccccggagtccggagtaggggagctggcgggggaccccagatttgagctgttagtgagaaggatgaaaaataagctggagtaaggggatgaaaggatgagaagctacacaaaagaggaattgggagaagctttgaagggaagaaagcggggacagatcctggatctgagagagagcagctttgaagatatggatctgtcaggatgggacctgggaaacatagattttggatggagcaatttcaaaaacgtccggctggacggggcagtttttcgaaatgcggatctttccaacacctattttccgggctgttccctcagaaatgcggattttacaggggcggatcttgggggtactaatatgagattctgtgatctgtcatattcctgcatctgcggggctgatttatacgcgggagtgtttgaaggggctgtccttactggactgaaggcagatgagaacaccaggttttaccggatgccctgccccgagtcgggtgcatttgtagcctataaaaagtgctttgacttcagaatcgtgcagcttttgattcctgcagatgccaggcggtgttctgccacgaaccgggcctgcagatgtgataaggctaaggttctgtctattaaaagtgtggatgagacccagtcatttacggaagccagatcctatgtggatgagaattttgtttaccgggtgggggaggtatcccgagtggaagactttaaccctgaccgctgggtggagtctaccacgggaattcacttctggatgaccagagaagaagcgatcaattactagcagaagagagggaagagatgaagagagtcagaagagaggggacagtctgcgtggaagatgcggagatttattttcgtgtagtgggggaggggaggccgttggttcttctgcacggaaatggggaagaccatacagctttccgggcccagattcagaggttcaggggagaatatcagttggttctgatagacagcagagggcatggcaaatcctctctgggctgccggggccttaacttttccctgatggccaatgacattctccaggtgctgaactatctgggaatagaagcgcctgtgattctgggattcagcgatggggcaaacctggccctgcagtatgcggttttgtatcccaagcggctgagtgcactgatagcagtcagcgggaactggtctcccaggggaatgaagttctggttttaccagggggtaaaatggatgtatttctggtggcgtctggccgctcattttcactggaaagcccgctgtaaaaaagagctgtacggtctgatggcccttcatccgaagctgacggaggaggaacttaagggaataacagttccggccctggtcattgcggctgacaaagatatgattcgggagtctcacacaagaaagctggcaggacttctgccggatgccaggctgaaaattattaaaaatgccaatcatatgtccatttacgggagaccggaagcctataaccttgtgattcacagatttttacaggagctggaaaaaaaagacgacgctttatgagcatcgtcttttttcttagaatctatcaaacggttcgtcatcaatcatgtttgggaagtgcatcctctctgcgttggggatcttccagatataagggactttctgtgtcagcagcctgagggttctccggagccggcggctcctgtttttccagcggccaccgtatggtcaccttgaacagatccgcgtcggtggtaatatgcatggttccattttgtaagtctacaaagcttttggcgatggccagacccaggcccgagccttcggtatttctggcggaatcaccccggacaaatcgctctgtaatctcctccggattaaaatttaattcctgggcagacacattcttcatggtaatcacagcttcaccggagatggcctccaccgtaatatatacccgtgaatggctcagcgaatattttagtatgttgattagcaggttttcaaatacccggtaggttttctgactgtcaagagtcaggcagattttttcatccggaagattccagcggaagtccagtgtggactgggaaatcttatcgttcagttcaaatgctacctgtttcagcagattcacaatatctactctcataagattcagagtcacatttttactggttgccttgctgatctcgaacaaatcctcaatgagtgctttcagccgcagagacttttgctccaggatatcaatataggagcggtgtatctcaggggaaaggtcttcatttttcaataaattcacataagttatgatggcagtgagaggggtcttcagatcgtgagatacattcgtaatcaaatctgttttcatgcgctcacttttgacctcttcctccaccgcttttttaaaaccagtctgtattttctgaatctctcctttaaagggttcaaagacacctaaatcttcgtctatggttacatccagattgccttctgcaatggcgttggtagaagataataattttttatatttcgttttcaaatcattaaagtatttctgcagtacaaagaacagtacaatggaatagaggatcagggccccgattccaaaaaaccagaaactgcagatgagagccagtataatgaagttaattcccacaattttcagaatggtacggtttgatttatcctgaaaatccaagtgatcaaatgagtgatacactttgacacacccccgcttgatccatgcgaagagtctgtagattaacgttctttctttaatgtaccgccgcagtccaagggtaaatacatttctgaggcaggacacgatccaatataccagggcaaaaatcagacaccaccacaagaggttccaggcaacggacaagctttcaattaaatacgggtttttaaggccggcctgttttaatgtctttgttacaattccttcattggtgattaccaccagatgaacaatggagctgacaataagactcagagggataaagcccaaaaacgctgcctccatgggcgcccggaaaattttttcgtttcctgtcctcaagggacggataaacgggattaacagggcagcgagccctaccaggactataaggaagagtaatgtctggtaaacaactcctgaatcaatgtacccatgatacctgctttccagatccaggcttaaataagcattggcattttcccttgtcataccgtagataaaggtacggttttgaggaaactggaaggaatagctggctgacaggctggtggatccgtaatagctttcatagtagtagtcatcaacagggtctttgcgtcccagggactccagaagattagagagctctttggaattctctccgaaggtattgagaacagttaaatttcctccctgatcgtactgcatagctacgccccagagatacttttcgtctttatccctggtaaggtcctccagaagacttccggtgacattctgatccagaatttggttgttctcatccaggacctgatactccagatttcccctcacattgtcaaaggaggactgccaggaccggtattcctgaagaatattatttttgaaatcagtcagcgcggaggcataagcatcctgttcatcccaggcctcttccatgtcttcagagacaggcgaattttcagcctcctttagatcaggatagaagatctgattgggcaaaatagtacgcccttcttttctttgtgcttcttctgtatataatacgtaattgccgtatattatctgacgtaaaaattgtgaatctgtataaaaattttctttgtatgcagaggattcccgatccagaaatggatataagcgcaccatccccacggagggcagcaatataaccagaagtataatcaggactgcaagtttatggttgtttttcgattttgtatccaactccccacaccacctttagatattttggatcttttggattgatttctattttttcacggatattccttacatggaccatgatggtatccgtgttgacagcgcgctcattccagacgcgctcatatatttcctcggcagagaagactcttccgggattcttcatcaaaagcaggagaatcttatattccatgggtgtcagtttaaccggctttccgtctacagttacctccaccgtgtcctcgttgatttccagaccgccgatgacatgaacattttctttctgttccagcttattcagaaacattttgtagcggcggagctgtgaattgaccctggccaaaagttccataggagtaaagggtttggtcacgtagtcatcggcgccgatattcagtcccatgattttatccatttcctccgactttgcggagagcataattaccggaaagtcataatcttttcgcagctgcatagtcatagtgatgccgtccattcgaggcatcataatatctacaatggccagatggatgacttctctgttgatgatttccagaccttccacgccatctgccgcctggtatacttcgtatccctgacttcgtaaatatatctcaacaccttcccgaatttctttatcatcctctacaattaaaacatgattagcttccatagtgtatgctcctttgtttttctttccattatactatattttccccaagggatacatggaatttaattgcagcacgattttgtcctcctgtcttttgagtatgggatcagtatagtggatgattctaaatttactcacgtggaaaatcgaaagaatttctaaagaatttcaaaaagagcggaaaaggtgactgcagcatataaaaaaggctgccgtcataaaagttcttatgacagcagcagtgcttattcctttttcatttttttgattgtgtccatggcttcctcatcgggtaaaatttctccaaagttccacgggacactttcccctacggatttaatggctacatggagcgcaaactcttcaatttttcctgcgacaaatgatttgaaagtatgtaacgtatgcattttatgaagtctccttttcctgctaaaattaaatattcccagaaacagatttggcttttctgcagaatagctttccgtaaggaagaatggaaagtgattcccagatacatggaatcataatcagtcccttcactgaatctgcagaactcatcagagctatgatgccccagaagctcataactataagtgaatttctcttcattttctttcgtacggatattttagaaattggattgttcttggtatcacagggggctgaccaatataacagaaccagaacaaagaagacagacagaaccaggaacacagagttccatctcagaaacttacttaatacagaggagataccacatagtgcgatcatcatgaatgtacaacctgcacccgtcctcatgtggtatccccctgcctgggagcgcatgctccaaaacactgccagtgcaagcagtacttcctgtcccaaacctactgcaactgcacagccgagtataaggataaatttaataagagtatctataattaattccagcccatatgccacaaccttaacgctgtcccctctgacagccttgtccctctggttgctactggcaacttgtcccgcgagccggcggcttaaagtttttatattcatccactcactatttcctttgcagccattaattgacaaatactcctttatccattactctctaatgagatactatcatatattattctaattttgcagttttatgcataaaaagcgtaattattaccctgaacgtttcgtatttaatgttagaaggaaaaacacagcatctatatctgacttgaaaaggagagttttatgaacgcaaacattttgactaatgcagtattgtccatggccaccctaattttagtatgcaccaacccgcttcccgggaagccccggctgcttcacagggggatcctttttgcagtgctgttctttatgtctatcctggtatttccccgtatcggacaagctgggactattgtttccctgtccattatttttgtatttctgatgttaacgcagaaggggcaccggctgctggcttgtatctgctccctttgcggttatattatttctattatgataaattatgtccttctgatcggtgcggataagttgctccgcctggaggtgagtgcactggccaccacgtatcttctaccgttttctctgttatttatggcagtgagcggcggtgctacctggctggtgggatatattctgcgaaataaaattaagatacaggatatacagtttaaccggctgaatatccttgccatatgtctgaatcttgccatatgtgtggtactgtttgtgtttaatattatttatggggacagactcggatatccggctgaggtggtttcatttaacggtgtattatttattgtctattttttgctttcctcagtgctgctttcgttttccatcttcagcataaaaaaagaggaggctgcgaaacataaactggaacgcttagaagcgctggaaggatatacaatgaatctggagagtctgtacaaccagatgcgcgcgtttaaacatgactatacgaatattcttacgactatgagctgctttttagatgaaaaggattacgaaggactgcatacatactttaatgaacgaattcttccgaccgggcaggagctgggacagaaatcatattctgtagggatcctgacaaatatggggattctggaactaaaaagccttctatatacgaaggtgattcaggctattacccaagaacttaccctgtctgtggatatcccctataaagtggaacgggtatccatggacatgatagatctcacccgcattcttgggatttttctggacaatgccctggaagccgcctgcatctcgaaaaagcgggaactgtacattggaattctccaggaggaagaccgatgtatctttcttattaagaattcctgtgacactgagaacctgtccatgggccgccttggtacgccgggatacagtacaaagggggagaacaggggaatcggcctttccaatgtaaacaagcttttggagaaatacccttcggcgcttctgaatacagagtacaaagaacacatattcagtcagaaactggaaataccgtgcgaaagataaaggagtgatttatatgctgcccatctatctctgtgaagatgaacaggtgcttctgctgaattaccagacggtgattaaaaactatttgttatttcatgaaaacctggaaatggaactggtgcttgcatccccggatccccacgagcttcttaagaaggtaacagaaaaaccccaggcagccgtatactttttagatatccagctgcattcagatatcaatggtctggaactggcaaaaaaaataagagaagtggatccccagggatatattatttttatcacctctcattcagagcttagcttaatggccttaacctatcaggtgacagccacggattttatcctgaaagataacccgcttgagcttaaggagcggctggtgcaatgcctggaactggtacacagccgccatacgcatcaaattgaaacatccagaaaagttctcacggtaaagatatccagcaggatattctcggttccgtttgacgaaatcgtatttgtagaaacgctctcaggctcccacaaagtgaggatacatacctgcagtacgatttatgaaacctatcaaaagctgaatgagctggagacctctatggacgaccggtttttccgctgtcataaagcctatctgataaacagagaatatatccggaaggtggataaaaaagcccgcaccatttccatggaagacggaagtatctgcccggtttctgccaggcagataagaaagctgtccgaatttttaggagtctgatagggcaaaaagggacaggccgggggccaaagggggacgtgttctttccagaaagaacacgtccccctttggcccccggcctgtccctttttgcgctcagcggaagaattttatgattttgtccatgcgggacgtcatgcttccaagcagtgcatccgcgatcactaatgcggccatggactctacaactacaacagctctgggaacaataaccggatcatggcgtccttttatactaatctctatgttttccccatctctgttcactgttttctgaggtgctgcgattgagggagtaggttttatggcggcccgaaggataatgtctgtattgcagccgtcactgatacctccggtgattccccctgcgtggttactcagctttctcacattgccttttgtatcgcaggcgtaggggtcattgttggtgagccccgttgcctttgacgcctgaagtccgtcacctatttctacccctttgacagccccgatggagaatattgctttgcccagattggcatccagtttttcaaaagccggatccccaagtcctcccggtacgttctttatgatacactcgatcatacctcccgaagaattgtgatctttcatacaggttttgagatattcttcagccctctgggcagcgtctttatctggcatgtaaaaggggttttcccaaattgctgtttcttcgaagtggtctttgtcaatcgccaccggaccaatggacagggtataggtagagaaggtgatccccagctgtgccaaaagctttgatgctatggcacccgcagccactcttcctatggtctcccttccggaggaacgtcctcccccccggtaatcccggaagccgtatttctgatcgtaattataatctgcatggccggggcggtagtagcccgcgatctcgctgtaatcccgggagcgctgatctttgttgcgaatcattatggaaataggggctccggtggtttttccctcaaatacgccggagagaatctctgcggcgtccccttccctgcggggggttgcgtatcgggactggccgggttttctccgatccagataacgctgcacatcctcctctgacaggggaaggccggcagggcagccgtccactaccacgcccaatcctgcaccatgagattctccccaggtacttatctttaatatattgccaaatgtagagccatacataataaaatcctcctgttttttgattctgcagtacatgcaccggactgtcggtttcctgtgcctttctgttacataataccataaaatatagtttactgtgaatgaaggaaataactttcttcctaaaatttgcataattactttacctgacgtagtaattgtggtatgattactacgtcagaagtactacgacagtcgtagcatagaacgataagggcaggaggcatgaagatgattagcagtgacgtcatacggggatacaacgacactatgattctatatcttctgttagacggagattcctacggatatgagatatccagaaatatccgggagattacaggcgggcggtacattatgaaggaaactacattatactcggcctttacccgattagaaaaacatgggtttattacttcttattatggaaatgccacccaggggaaaaggcgtacgtattacagggtgacagacgcgggcagggcatattaccgcagcaagtgtgaagaatgggaactgacaaaggacgtagtcaatcattttatcaggagggatgtataaatggagacaattaaaaattatctggacactatgtttcagaacctgccggattctcccgaaatccgcagggtgaaagaagatctgctggccagtatggaggataaatatcaggagttaaaagaagagggtgcctctgagaatgaggcagtggggagggtaatttcagagtttggcaatattgatgagctgctgagcgaactcggcatttccccggagggtacagaggaagagcctgcagaggagagttgccttctgcccctggaagaagcccagaggtacattcaggaagcccagagagaagggcggcacgtagctttgggggtaacccttatccttttcggagtctcagtgcttatatttctggcgcagctttttgagatccgcattctggggatgggaattccgaagccgatcagagaatttatgccgctcctgtcctttttcattttccttgtgcctgctgtaggactttttgtaaacagcggcatgaagatggacgcttataaattcattgatcagggagaattctccctgggaaaaactacaaggcagattcttggccgggaggctctggagataaaagatgccaatcggatttatattgtattcggtgtcctgctgtgcgtgatttcccctgtagtcttattcgtggcagggatgttcggggacacggcggcagggtacagtatctgcgtcatgctcatcttaatcgcagcaggagtcaatctcctcatcctggctggaaccagggaggatgcatacaaaaagctgctgcaaatggataattacgcacagatccacaaaagggaaaataaaattatcagtgtagtagcgtctgtggtatggcccctgactgtagtcgcctttctgatagccggattctgctttggcatgtggggaactgcgtggattctgtttcctgtagtgggaatccttttcggcgcattctcagcagcctgccaggcagcatcggggaaaaaagaatgaggccggaacttatttatctggccgggattaatatcctgacatttattgtctttggggcggacaaatataaagccagacatcacagataccggatcccggagaacacgctaatgtttctgaccgcaatcggcggaggcgcgggagccctggccggaatgcaggtattccgccataaaacgaaacatctgaaattccgcctgggcgttccggtaatcctggccgcagaggctgcggtcttgctgtggtacttcgccagatagcataaggagcaggctggcttacgcctcccaccgcccagaagccccgcagggcagcaccaggccgttggaggaaaccggaagccccacttcctgggagtccacccggcccctgaactttttaagctctgttgccagcatataagtcaggacagccggggcaaggccagtagtataagagtttaccaggaagaacagaggcgtgtcacttagcagctttgtacagagctgaatcaatggataaatagcctcttctattttccagatctctcctttgggtccccttccgtaggaaggaggatccataattatggcctcatattgtcttcccctgcggatttccctctccacgaacttgacgcagtcatccacgatccaccggataggtgcatccttcagccctgaggcagcggcattttccttggcccaggtgaccatacctttggaggcatctacgtgtgttacctgagcccccgcggcagccgcagctatggtagccccgccggtataggcaaacaagttcagaacccggaccggacgtccggctttttttattttattgctgaaccagtcccagttgaccgcctgctccgggaagagtcccgtgtgcttaaagctgaagggcttcaggtgaaaggtcagatccctgtaatggattgcccactgatccggcagatcaaagaattcccattctcccccgccgcttttgcttctgtgatagtgggcattcctcttagtccagcctttatgggttctgggggtatcccagataacctgaggatccgggcggaccagaaggtactttccccatcgttccagcttttccccctttgaagtatctatgatctcataatctttccaaccgtctgctatccacatgataatttacctttcttttttcattcaatctgttttttcaaattatatcatacctattctatatttgaaaaggcaagcatacattatcctagaatggccgggccttgaaggaagaggccggccactttaaccggaggtgccagaatgtttgagatacaggatgtgaatgaactggaagagagattccgtacagacagcaggagaggactgccgaaggaggaagcccgcagccgcttaaaggagtatggggagaatgtactgaaaaaggagaaggggcagactgtgtggggcatgattctggagcagctgaatgaacccatgatcttcatcttattcatggcggcagctatttcgatgcttctgagagaatacagtgataccatcattatatttgttgtaatagccatgaatacggcagtgggggtaatacaggaggggaaggccagaaaggccatggaagccctgaagaagctggcggccccggtggcccttgtaaagagagataatgaataccaggagattcccgcctcccaggtagtaccgggagacttggtaaagatagaagcaggtcgccaggtgcctgcggatgttcggataaccagcgtcagaggtctggcgatcaatgagtctgcccttacaggagaatcaatgccggtggaaaaaacggaccagcctatgtccgccgaagcccctatggctgacaggaagaacatggcctatatgactacagaggccatgaagggccagggtgaggggattgtagtagctacaggcatggagactgagctggggaaaatcgccggtcttattaacgaaactacaggagagctaacccctcttcaaaaacgtctgggagatctgggaaagatactcagcgtagtggcagtggctctctgcgtgggtctttttttgataggagtggtacagcaccgtaacattctgcagatgcttctccttgctatttcccttgctgtggcagccataccggaaggacttcctgcggtggtaaccatagttctcgcactgggggttgcccgtatggtgaaggtgaatactattatccggaagctccctgcagtggaaacccttggagcagtaggggtggtgtgttccgataaaacaggaaccttaacggaaaataagatgaaggtggttactgtctactgcaacggtgaaattatgcccgcagagaaattgaacccgcagcttcacgataggtttctggagggatatctcttatgcaatgacagccagctgggggaacaggagatcggggatcccacagaactggccctgctctacatgggaaaagagagaggagtaaagaaagaggttctggaaaagcaaaagcccaggataggggagcagccctttgactcccagaagaaatacatggtaactgtccacagagagggaaaatataatactgcatatgtaaaaggcgccggggattatatcctggaacagtgcaccgggatactggtgagaggcaagatcctgcctatgacccaggtgcagagaatgaagatccgccaggcgatggaaagcatggcgagggatgccttgcgggttctggctttagccatgaaggaacgggccggggaggttaccgatgaaggactcatgaaagggctggtctttatcggccttacagggatgatggatcctcccagagaggcagtcaggaattccgtatctatcctccaccgggccggcgttaaggtagccatgataacaggcgatcacaaggatacggcctatgctatagccaataaaatcggcatcgctgacgccagggaacagtgcatcagcggagacgaactggagcgcatgacggatgagagactggaggaagtcattccaaagctcagagtattcgcccgtgtaacaccggaacacaaagtcaggattgtcagaggatttaaaaagaatggacagatcgtggcaatgacaggggatggggtgaatgatgctccctcgctccaggctgcggacatcggaatcgccatgggtaaatcaggtacggacgtggccaagaacgctgcagatatgattcttacagatgataacttttctactatagaaaaggcgatggaagaagggcgcagtatctatgtaaacattaaaaaatccattctgtttctcctgtcctctaacttcggggagattattaccatgtttgcggctgtgctgctggctctgcccacgccccttaaagccagccatattctgtgggtaaatctgattacagattctcttccggcactggcgctaggggtagacaaaaataacagaaaaacgctcatgaaccatccgccccgggatccgggtgagagcctgtttgcccacggaggctggtttttgactgtattttacggaatggtgatcgctgggattacgctgtatgcttttcacaaaggcgggcagacctatgcatttaccgtgctgggggtttcccagcttttccatgccattgggatgagagatacggagcgctccatctttcggatgaatcacctggagaatcctttcatgatctttgcattctttgcaggtttggggcttcagtttatggtgacagagattccttattttgttcaggccttccagaccgtgaaactggatatgggcacctggctctggcttctggcagtatcggcaataccgttgctcttccatgagctccggcttctatttataaagaaggaaaaatgagcagagggctagacgaacgtacgaaatgaaggaaataatatatgataatgcatacaaaaacgaaaaaacaggaaatgaaccagttgaaaatgccaaaaaatgcaagttggtattgacaattagtcaaatctcatactacaatagcaattatgagaatttgttgcagaacgctaggaggaaattgaggatggtaccatatagtgaattgagcagggaacagctgctgcgtatgaaggaagaactggaaaaacagtatgaggatgtgaagggaaaaggactgaagctggatatgtccaggggtaaaccggcagcagcacagctggatttggctatgggtatgatggatgtactgaacagctctgcagatctgaagtgcgaggcagggattgactgcagaaactatggtgttctggatggaattcctgaggcgaaaaggcttttaggtgcaatgtctgaggtagatcctgacagcattattatctatggaaattccagtttgaatgtgatgtttgatacagtagccagatccatgacccacggagtgtgcgggagtactccatggtgtaaactggataaagtaaagttcctatgtcctgtacccggatatgacagacattttgctgttacagaatattttggcattgagatgatcaatgttccgatgctttccacaggccctgatatggatctggtagaaaaactggtaagtgaggatgcgtccatcaagggaatctggtgtgtgccgaaatattccaatccccagggaatcacctattccgatgagacggtcagaagatttgccagattaaaacctgcggcaaaggactttagaatctactgggacaatgcgtacagtattcatcacctctatgaagacgatcaggattttcttatagaaattctgggagagtgtgccaaggccggcaatcccgatcttgtatataaatttacctcaacctccaaagtgagctttcccggttcggggatcgcggcagttgctgcatcacctgccaacctggaggactttaagagacatatgcagttccagacaatcggccatgacaaattaaatgaactccgccatgtgagattcttcaaagacttagacggtctgaccgcacacatgaaaaagcatgcggacataatgagaccaaagtttgaggcagtgatcaatgtcctggaaaaagaacttcagggcaccgggattggaagctggatcgcgcctaaaggggggtactttatttcctttgatgcgatggagggctgcgcaaaagctattgtagccaaggcaaaggaggcaggactggtgatgactggagcaggggcaaccttcccctacgggaaagatccgaaggacagcaacatccgtatcgctccctcctaccccacaccagaggaacttgcagtagcggccgatatctttgttctcagcgtgaagctggtaagtattgataaaatattggaaagcaagtaaacagatgagccttcccccggggagggctcattttctgcaggcgggaagtgtcgcttttggtcggctggaaatccttaaaattctgtgaaaaggctttaccaaacaaatgggtaatgttacaataggacgggagtagaaataagcagaaaaacaggggaatttattatgaaaactaagagaaaaggaaagaaaaaagctaaggccaggaagattgtcctgggtattcttatcgcgtatgtagcggtgattgccgtcatttatctgggggcatccttctattattcaaagcatttttattccggatccaagattaatggaattaactgtaccggaaaaactgtggaggaagtagaggagattattgccgatgaaattggatcctataccttaaaggtcagggagcgggaagataagacagagaatataaccgcaacccagattgacatgaaatatgtcagcgacggcaagatcaaggaattgaaagaggaacagaacccatttttgtggcctatgtcttttactaaccataaagcttatacgatgtcagccacaaccacctacgacgaagaaaagctggcggccgccattgacgggctggattgctttaaggaagagaacatcacccagccgcaggatgccaagctggtggaaggggaatccggctatgaaatcagtcctgaggttcagggaaatgcgctggatcaggacaaggctaagcagcttttgaaggaagcgatagccgggggagagacggaggtttcttttgaagatgcagactgctatctgaagccttccgtactgagcgataacgaagacctgatcaaacagagggatcagattaatacatatctgcaggtaaccatcacctatgacttttcagaccgtcaggaggtggttgacaaggacgtaattaaaacctttctcaccacagacgaggaagggaatgtggggctggattcggagaaagtaaaacagtatgtaaaggaactgggatatgagtacgatacgttcggcctgagccgcgattttaaaacctctctggggactacggttcacctgaagggaggagactacggatgggtcatcaataaagacaaagagacagcggcgctgatagaggcaatagaggcaggggaatcccagaccagagagcctatctatctctattccggaaaatgcagggacaccaacgacatcggcggtacttacgtggaggtcagcatacaggatcagcggatgtggtgttacaaggatggccagcagattgtagatacgcctattgtaacaggaagcgttgccaaggggtatgatacccccgcggggggagtatgggctattgatgccaagaaacgggatacattcctgaaggggcagggatattcttccccggtaagctactggatgccttttaacggcggcgtgggaatccatgatgccagctggagaagtgatttcggaggagagatttataaatccagtggttcacacggatgtgtaaatacaccttttgagaatgcaaagaccatatataacaacgttgaaatcgggacaccggtggttgtatattaaatgcgaaggggcttgcagagcgtcagtatctggcgctttggaagctctttttttgttggttcgcctatttcggagaggatgaaagggaaaatgctctccttcttgcatatggtgctaaatcccttcatttcattgacaaaacgggcattattgattagtataatgaataagtaaaacgtcgtatttatgtgaggagtgactattatgaacattgtcgtactggcagggggaatcagcaccgagcgggagatttccattatatccggaacgaaggtctgcgaggccttgagagaaaaaaaacaccgtgcaatattagtagatgtctctttcggcaaaaaggaaatgccgtctgatttatttcctacagagtatgatctggacagagaggttgcttatatcaatagcttcaacggacaggaagagaaaaggaaaaaagacagagaatttttcggatcccatgtattggagatgtgccggcaggcagacatcgtatttctggctcttcacggggaaaacggcgagaacggaaaggtgcaggcctgttttgacctgatgggaattaaatatacaggaacaggccctctgggcagcggtatggccatggacaaaggaattactaaaagtatcttccgatcggcgggagtacccacgcccggaggtgtacttctgaaaaaggacaattacagcagggatcctgcggattaccagatggagctgcctgtggtggtgaagccgtgctgcggtggatcaagcgtaggggtatgcattgccaaaagccgggaagaatacgagaaagccctggaggagtccttttcctatgaggaggaaactattgtggagcagtatattcagggcagagagttctccgtaggcgttgtggacggggaggcctatcctattattgagatagccccaattacaggcttctatgactataagaacaaatatcaggcaggtgccgccattgagacttgtccggctgagatcccggccgagacagcggagaagatgcaggaggcagcggtgaaaggctaccaggccctgtctctggaaagctatgcccgtcttgattttatgatgaatgagaagggcgagttcttctgcctggaggccaatacgctgccgggaatgacacctaccagcctgcttcctcaggaagctggagctttgggcatggattttcctgctctgtgcgagaggctcatccaggtatccctgaagaaatatgaatagatggagaaacatatgaaaaatctgacattagaacatattgccgcggcctgccatggaacttacaggggaccggaggagaaaaaggcagtgtgcgtgaccagcattattacggacagccggaaagcagaggagggctgtctgtttgtccccatcaaaggggcaagggtagatgcccatgaatttattgaaagggtgatggaggccggtgctttgtgcaccctttcagaacaggatttgggagaaaagggatatccctggattcaggtagattcctcccttcaggcagtgaaggacattgccgcgtattacctgagacagcttaagattccggtggtgggaattaccggcagtgtggggaagaccagcaccaaagaaatgatagctgcagttctcgctcaaaaatataaggttttgaagacacaggggaattttaataatgagctgggactgcctctgacgattttccgcctaagggaagaacatgagattgccgttcttgagatgggaatcagtgattttggtgagatgcaccgtctggcagggattgccaggccagagacttgtgtgattaccaacattggatattgtcatctggaatttctgaagtccagggatggggtattaaaggctaaaactgagatttttgattatctggaggagactgggcatattatcctgaatggagatgacgacaagctttcctctgtgggtgaagtgaaaggggtgcagcctgaattcttcggaatacaaaaccaatgggggctttttgcggatgagatagaaagtcggggattacaaggcgtatcctgccgtattcatatggatggttcttcttttcaggtattgatcccgcttccggggcagcatatggtgtacaatgcactggccggcgctgcagtggggcgtgtatacggcctgactgcggaacagataaaagcggggatcgaaagtctgcagcctctcagcggaaggttccatataatagataaaaacggtatcacggtaatagacgactgttacaatgccaatccagtatctatgaaagcgtccctggagctcctcaccgatgctttgggacgtaaagtagctatcttgggcgatatgggtgaacttggagagcaggaagccaggatgcacagggaagtgggggcttttgcggccacgctggaccttgatgtatgtgtatgtgtgggagcgctttccagaggcatggcagaagcggcaaaattgggaggcactcatacgaaagtgatccatatggaatcactggaggagcttctggaagggttggacaaaatcatccggaaaggggatacgatacttgtgaaggcctctcactttatgaagtttgaaagggtggttgaagcccttacccgggacagatagaggcattcttaccgtgcggcaggagtgcagccgcaaagtacttataaatgggaagcggtcattgcagtctcaataaataatttcatggcttccgggatatatttatccttatggtacacaatatgatttacgttctgtagggagagctcacctgtttccaggggaatgagctctcctttttttatctcttctttaaccagaatatccggaagaacagtgatcccaagagaggctttggctgcctgtatgagcgcctgagaattgacactggtccaggctggggtgagtgacagaccggccagtgtgaaggcgctgtccagggtatcccggatggcactccccttttcccgtaccagcagcctttccctctgaagagcctccagtgtgagcatggacctgagggcgcaggggtgcccgggagaacataaaaacaacagagaataggaggaaaagggcaggcttaccagctgggagtagggaatgggcccctcgatcagagccagatccagctcattgttcagcagcttttgggtgacagccccggcctgctctatgataatctgttcctgtatatgctctgctgagctgcaaaaagcggccatgatagagggaagccagaagtttcctatagtaattgtagaaccaatccgaagcggcagcggctgctcagcagtgagcgcattcgatttaagctcctcgtacaattccagcagccggttaacctttgacagcataatgttgccggatgcattcagatagatgcgcctggaaaggcgatcgaagagaggggaaccaatctctgcttccagttcaagaatagcgtgggagaccgccggctgggtcatatacaggcggcgggccgccctggtaaagcttccttcctcgcagacaattttgaatatgtataaatgtcgaatggtcatactgtctccaatccattactaattatttatgatatatagaaaattatataattttactaatggattggcaagagatataataggaataaacgtgaggtgctgcctcacttcagaaaggggaaaccagatgatatatcaggtacggcgctgtttatggctgttttttatacatatgtttatcagcgcatttacatttggcgggggatatgttgtgattccaatgataagaaagtattttgtagagaaacatgcgttatttcaggaggaagatctgctggagatgtccgcagttgcacagtcggccccaggggcaatcgccgtgaatctgtcggcactgaccggataccgtgtggccggcaggataggggcactcatgagctgtgtgggctctgtggtacctcctttgcttattctgtctctggtatccatgggatatgaggcggtggccggcaaccggattctgagagggatccttggaggtatggaaacaggagtggccgcattaatcgtagatctgctcattgatatgtggagggctctctggagggaaaaatacatgcttcttccgatcctggcagtggggacctttttggggagttatgtgctgcatctgccggtgctccttctgctggggctttccagttttctctgcgcggcaaagatgtggggacggagagggggagaggtgtgttaaagacattattcactgtatttttagagattggggtgtgcagctatgggggaggatatgctgtaattcctctgatccaatcccaggtggtagaggagaggcattggctgaccgtaagagagttcacggatattattaccatatctcagatgactcccggccctttggcagtcaatacatctacctttgtgggactgcagacgggaggaatccccggagctgtactggccaccgcaggctgtattctggcaggagttatcatctctcttctgctctataggtttctggagaagaaccggcagtctgtctatatcagagaggcgtttcggggactgagggcatcttccctgggtttgatcctatcagcagcggtaactatactgggcctggcgctgtttcaaaaagggaagcccggcggcggacttccctctatgctcctgtttgcagggtctctgctgcttctgcggcggtttcggatccatccgatcctgttaatgctgggtgccggggccgcggggcttttatttttttaaaatcagacaccgtactgctttttgtttttctcaagcatctcagcaatgagctttctgcagtattccccgagaaatttcttgtcttctttgctgagctggctgggataaatgggatctccatattcaatcactacttttctggccttaatccggggaaactgatcctcgaagattgcggaggtattgttcagggcaatgggaatgattggacatcctgatttggttgcaatcttaaagctcccttcatgaaaggggagaagctccaattcgtccttacccttgtttctggtcccctccgggaagatgcagacagagatcccctttttaacttcgtccacccctgccaggatagtctttagaccttctttgatattatccctgtccaggaagagacagtgcaggtacttcatccagttgctgagcagaggaatcttgagcatctcttttttggctacatatcctgtgcgtccagggcactgaacatacgtaagcagaatatcgaaaaagcttctgtggttcccaatgtacagcaccggctggtcagtgggaactttttcgtggccgattaccgtagcgtcaataccggccacacggatacacagccggaagactccctggaccagtctgagggaagtcatatccttaaccctgggaaaggccagaccgataagccattcaataaaaagaatgggaatggataaaatcaggaaacctacaacaactatacataccactaaaaaacgaatcataatttcctccaactggcgcctgagagcgcccaaagcatttctataccaaatggtacatatccattatacggaaaaaacaaaaaccttgcaatgagaaaagagaagaataaatttgaacattccacataaaatattggtaagaatgggaaaaagggcatcattatgaaaaaatggacaataggactcctgctggtcagtatgatggcagtctttctcggaggatgcagtctgaccaaggtaaaagctgatgatgtagtgaaaccagaatatacggtgatgaaaacagatgacttcccggaagaggtagcagacttaattgaagaaaataaagaaaaggaattccagatgacatatcaggacggagaatatctctacctgctgaagggatatggaaaacaggaaacaggaggatacagcattcagatcgcggatttgtctctgtgggataacgcgattcatctgcagaccactctgatcgggcctgacagagatcaggagatcaaggaagagccgtcgtatcccaccattgtgatcaagatggaataccgggaagagccggtgatattcgaataaattatagaaaagagggcatattttggaattattaacgaaacagatgcagatgctgacagtaaaatgccaggcaatcagccaggtgacatttgacgaggatttaaatgttccggatgtaaaaccagatgtggggcggatgatccagaaaaaaggggaagtactgattgaggatgttcagatttctgagggagctgcctatattaaaggagagctggtaatttccctgctctatgtgggggacagtgaagagagaaggatacatagtctccagggcagactgcctatcggtgagacgcttcatctgaacggactggaaaacggagataaggtgcgcctgaagtgggagatcgaggatctgagcctgcagctcatcaattccagaaaattaagtgtcaaggcactggtaacatttatggccggtgtggatgagacgggagaggtacgtcttcccatagggcttgtggaggaggatatctcacagaaaaagcagcccatcagtgtcatgggtctggcggtacataaaaaggataccatgcggatcaaagaggaaattgccctggcatccaacaagcctaatatttatgaacttctctgggacacaatcgaggtgagaggcctggatatccgtacagaggatgacaaggtgactgtaaaaggggagctctttttatttgctctgtacagcggcaatgatgacaataattccctgcagtggctggagcactcggttccctttgcgcaggaagtggagtgtctgggctgtgccatggatatgatccccaatattgaggtgaacgtcagccagagcgacctgaaggtgaagctggacggggacggggaagagcggatgatcggggtagatgtggttcttgagcttgagattaaggtgtatgaggaggaagaactctctcttcttctggatgtctatacacctctgaaagagtgcattcccattcgggagacacagaccctggaaagtctccttgtaaagaacttctcaaaatgtaaggtcaatgatcgggtgaaggtagaagaagaccagggaaaaattcttcagatctgccatagcgacggcatggtaaaagtggatgataccagaatcgtagaaaacggcatacaggtggacggggttgtacaggtaagaattctctatattgtaggggatgatgatatgccgttctattctatgaatgctatgatacccttcagtcatgtggtagaggcaaaaggaattgaccaaaactgtgtctatcatctgcgggcggatctggagcagctgtccacaaccatgattgacagtgatgagatagaggtcaaaattgtaatgaatctcaatgcacttgtggtgagacagaacccccagggtctgatctcagggattgaggaacaggaactggataaggaaaagcttcacaatatgccgggcattacgggatacctggtgcagccccaggacactctctgggatattgccaaggcgttctatactacgattgataccattatggaattgaatgaactggagtcagaagagattaagccctatgatacgctgattttaatgaagaaagtggaaagctgatccaagaaagggacgctgcctcatagcctgaaaaggctgtgggcggcgtcctttttagagccgtcctgcccttttatcccagggacaactaaaatgttatcttaataaatggtaattaatcacaaataatcaaatcaataattgttaaaaagtaatattgacagaaaaatgtactcccactataatgaaagtaacatcactggtaataccagttaaatgatattaccaatagaacgtatcctacatattaagaaagagaggtaaaagaatggacaagttaattatcaccgcaactgtagactccagtgcatcttatccggataatccctactgccccaggatgggggatgtaaagacaacggccgaagaatataaccgtgcagtggatgcaggagccagtatctgccatgttcatggggttcattttctggaggatgagattcagccggacggaagacagctttccgccatagattttgatggatggcaggagctgaaggaccgcataaaggaacatgcggatccggtaattcagtacggaattgccagtgcccggatgcctgcgaaggtgaagcttatggatcagaaaccagatatgatgtcctactgctttaatgctcatgatgaatgcttccagccaaatcctgacaagccgcccaagtgcacctatgcagtacatcctatccaggagctgcgggaattcctcaatgcatgcaatgaaaagggagtaaagccggagattgagtcttttaccacaggagctttttacaacatcgaagcattgagaaaggaaggtttgtttaaagaagatgaaccaatctggactacgttatttatcgcatggcctggcggcgcgtggacaccgcctacccctaaatctctcattaactttgtagatcatctgcctgccaatgccaattttaacgtgagtgttatgagctatgatgtaaataaaaattgggagatgctgacccaggcaattctccttggcggccatgtgcgagtgggctgggaggataatccttatattgcccccggagaatatgcaaaaaccaatgcccagctggtagagaaaatcgctgcaatctcccggagccttggcagagatgtggcaagtcctgacgaagctagaaagattatttttggaaaataagcagacataaataggatgtcagacatgcagaaactactcgtggtactgtatgaaggcatcctattgtgattatagggaaatgcacgaaagagaggaatggcaatgaaagcaatggtcctggaaagcatggaaaaaggcgcccatctgatcaatgttgagcttccggaaataacagaaaacgatgaggtgattctgcagataaaagcctgcggggtctgcgccacagatattaaggttatgaaaggcgatatagaaacgaatggggttccccgcattttgggacatgagcctatggggatagtggtaaagaaaggaagtgcggtacacaacgtaaagatcggagaccgggtagtaactgccacatatgttacctgtaaaagctgtaaatactgccgtaccggacgggagactctgtgcgaacatgtatcggcaaggatagggatcactatggacggggcatttgccgaatatatgaagattaagtgtcagaacctggtaaaggttccggacggtgtacgggacgaggaagcggcagttatgccctgcggtgcaggggtcccataccacgcgctggttaagcggctcaagctgactcccatggaccgggtgattgttctgggagtagggggagtgggaatgcaggcccttcagcttgccgccctgtgcggagcagagacagcagctgttgatataaacgaagataagcttgggatggccagggataacggtgcggcatatacggttaattcctcagaggaagggtatctggaaaaactccgggcatggggggaatggaatgtgctgtttgataccaccggatatcccccggcgattacaggctgtgtctcgattctggtaagcggatccagggtggtcctggcgggatatggaaaggacaaatccctgagcattccgctggcagatgtagtgctgaaggaactggagatttatggatccagaggggtcagcatacaggatattgaagaactgatgtctttggtggagagaaaaaaactgcagcctgttacccatatatatccgatgcaaaagattgagcaggtatttgaggatctgcagaataacaggctgaccggacgtgcggtgatcgttccgtaaagggcagggaaggaagggagaatattgacaaacgaaaagatactgaaattatacgaaattatggtaaccagccgtctgctggacgagttctgtgaaaacgaatttgtgaaaaaaggggtcaatctgcgccattaccactcggggatcgggcaggaggctctgtctgtggcaggggcgtttgttctgcgaaagacagattacctctactatacccaccggggtgtgggttctcttctggcaaagggggtatccctggaggcggtaatgcgtgatatgtttttcaagacaggaggaaccaatgacggaagcggcagtgtcatgcacacctatgcgcctgagataggggttgtagggagaaacggggtctttggctcccggtttaccattgctgccggacttgccctggctgccaaggagagaaagacaaaaacagtagctttatgctactacggggaggcggctgccgcaagagggatgtattatgaggcactgaatatggcggtgctgtggaagctccctgtgatttatctggcagagaacaacggattttctgtcagctcaaggacagaggaagtgtatgcgcccgggaacatgtctgatatgtggagaggttttgatatcccggtgatacggtttgacggcaatgatatgtttgctgtggcagaggctgtggagaacgctgtcagccgggcgcgtgagggaaaaggccccagtgtactggagggaatcacctaccgtatttctgaacatataccttttgaggatcactatgcataccgggatgaggctgagatagaggaatggaaagaaaaggatcccatcgggagggcaaaaaaatccttaattggcatggggatctggagcagggagaaggacgaagccctgtgtgacacactgagggggcagatccgtgaactctatcagaaggtggaacaagcacctgtaacagacccctcagaaatataccggaaagtatactataggtgatcagataggaggtaaaacatgagagtaacactgagggaaggaatacgcagagtattgtttgaagaaatgcagaaaaaccaggaaatgctcatgatgggagaggctttctattacaccggctctctgttttcaaaggtaatcacgccaaagtttcatcttacctatggaaaggaacgtatcctggagtgcccggtggcagagaacggtatcataggcattgcctttggcgcggctctggccggcatgacagtagttcctgaaatctgggcggctgactttctgctgtgtgtgggaaatgagattgtaaatgacattcctaaatggagataccagcacagataccgggaacctatccatatggtaatccgggcgcctatgggacttttttccgctgggggaggggggccggagcacagtcaatgtacggaggcctggcttcataattcacccgggcttactattgtcgcccccagtactgtgagggatgccatgggattgttgagagcttccttaaagtgcggcgatccggtgatcttcctggaacacaggcaggtatacgacgtggaggaagaagtggaggacacctattttgaaacggaactaggaaaaggaaggattgtgcgggagggaaaggaccttaccattgtcgcctggggaatgatggcattgcgggcagccagggcagcagacatgctggagactgagggtatccaggcagaggtgattgaccccagaacaattaagcctatggattatcagatgattctggagtctgtgaaaaagacaggaagactggtggtagccgaagagtctcccagaaccggcagcattgcgggggagattatgacaagggtggcagaaggcggggcaggtacccggatggcccgtctgaccatgccggatttgccataccactatattcccgaatatgaggcttctacggtaccctcggagaaagagattgctgccaaagctagggaactgctggggatggcgtaggcttcccggaggaagaaaggaagtgacagtatgccggttttagaagtaaaagggttgaaaaagcattttgctggggtgcaggctttaaacggtgtagacttcattctgaaaaagggggaggtccatgccctggtaggggagaacggcgccggaaaatccacactgatcaaatctcttacgggaatctacaggccggacggaggggagatacttttggacggaaagccctatgcccctcagcatccaagagaggcctttgacctggggatcagtgtcattcatcaggaactgaatctgcttcctgaactggatgtggcagccaatattttcatgggaaatctccccacaaaaaggaatggcctgatcgacaaaaagcggatgtatgaggaagcaggacattatctggaactgcttgggctggacttttctcccaggacaaagataaaaaaattaagtatttctcaggctcagatggtagagattgcaaaatccctgtcccacaatgcaaaaatcatctttatggacgagcccacctcttcccttagtcccacggaacaggaaaagctgtttcaagtaatccgggatctgaaggaacggggggtctctatcacctatgtatcccaccgcctggaggaaattatggatatctgcgaccgtgttaccattctccgggacggacagctggttacatccatggatataaaggacacgaatatggatgaaatcatcacccgcatggtaggaagagacttgtccaaccgctatcccaagatgcagatcacaccgggagagacgcttctggaggtgaagcatctctctaaaagcggtgtacttcacgacatttctttttctgccagggctggtgaaatcctgggaatatccggattcgtgggcgcgggaaggacggagctggtgagggctgtgttcggcgcagatccggtggacagcggtgagatatggattgagggcaaaaaggtccagatccgaaatgtcacagatgctgtcaaccatggaatcgcgctgctgacggaagaccggaaaaaccaggggctgctgctgaatatgtccatcaaagacaatatctcagtctcagggctaaactgcatcaaaacaaaaccgaaattttttaagggtccgtttgtggataaaaaagccgttgccgagaacgcgaagtattatgtggatgtcatcaagataaagaccccgtctctgaagcagcttgtaaaaaatctaagcggggggaaccagcagaaggtgatattgggaaaatggatgtccgtgaatgccaaaattattatatttgatgagcccaccagagggattgatatcggagccaaggcagagatttatatgctgatggaacagctggcaaaggcgggggcggccattattatgatatcctccgaactgcctgagattctgaatatcagtgacagaatcctggtcatgaggtatggccatataacagccagactgacagctcgtgaggcaacggaggagcttatcattcattactgcgcaaaggaggttaaagatgaaagcacagcttgaaaaagaaaaagcatgggtaggaaagtatgtgaacagatccacggtaaagaacttaagtactctgtttgcgctgattgccatctggatatccctgagtattgtatcaccgtattttttgaccatcagcaatttcagcaatatgtttctccagtcggctaatattatgatcctggccattggaatgacactgattctcatctccggccagatcgacctgtctctgggttctatagaagcgtttgccggtgccgtcatagccgtattaagtgtcaaataccagctgcccatattcgcggcgctgcttattgccctgttggtgggaaccgtgtgcggaatggtaaatggtttcctggtatccagatttaattttcctgcttttgttgcaaccttaagcatgcagggcattgccagggggcttgcgctgattatcacaggaggaacctccgtttatggattccctgacctgtttaagtttctgggccaggggaagattggggcgattccgtttccggttattattttccttattctgctggccgtattcggagttgttgttaaatccacaaaattcggcgtgaatctgtttgctgtgggaggaaatgaggaggcggccggcctgtctggtataaatgtgaagaaaacaaagatgctggtgttcattatatcagggaccttagctgcactggcaggtgtcattgttacctcaaggctcaattccgggcaggcaaccatcggtgaggcagatgttatggataccattgcttccgtagtaatcggggggacctccctgagcggaggcataggaagcctgagaggaacggttgtaggtgttatgataacgatctccattagaaatggactgaatatcatcggggtatctgcctattggcagcaggtttgtatcggtcttattatcattgcggcgattctcattgatcagttcagcaaaaaagagcgttaaaagttaggaggagaaagatgaaaagaaaacaaaggaaaggaaacagatggatatctatacttttggcagctttactggcagtgagtatgctgcccggctgcgcaaagcagaaggcagaggagacagagaccacagagacgaaggaggaaggcaagacagcagagactaagcagccggaggatattcggctggggatgatagtgggggacctaagcaaccccttctttctcacagtcaaagaggcggctgagaagcgggccggagaactgggtgtctcaattacagtccttggctccaaaaccattgaggaaaatgtaaaggcaggggaggatatgatccagacgaaggtggatgttatggcaatcacgccatttgacgccacgggcaatattcctctggtggaatcggccaatgaggcggggatccctgtgtttaccattgactccaccgtggacggaggagaggttgtctcctatattggtacagacaatgagctgggaggagaactggccggggaatggatggcagacaaaatcaacggaaaaggaaagattgccattatagaagggggatcaggctcgtctactaatacttaccggctgaagggattccgcaatgtcatcgatcagtatccggagatcgaggtggtggcgtctgtggcggccaactgggccagggacgaagggctgaatgccatgagcgatatcatagccggcaatccggaccttgcggcagtaatggccatgaatgatgagatggccctgggggccatggaagcgctgaaggcggccggaaagacgcaggatgttgtcctgtgcgggtataatggggcggcagaggcgatacagaatatttataacggcgatatggcggcaaccgtggcccagttcccggaggaaatggggaggatgtttgtagacgctgcgtatgacattgcagcaagaggtgtatacccggatacggatcacctgaagcctcctgtatatatggtagatacggtgtcagccaacaaggcaatggctgctatcacggatacggacatgaagctggactataccacgtctgtgaaagcagataaaagataccgtttggggatggtagtgggggatttgagcaacccgtttttcctgtctgtaaagaacggggccgaggcaatggcggatatcatgggggttgatatcacagttcttggctctaagaccattgaggaaaatgtaaaggcctcggaagatatgatccagacaaaggtagatgccatagcaatcacaccctttgatgcatcaggaaatatacccgtagtggaggcagccaatgaggcgggtatccccgtatttaccattgattctgatgtggacggcggagaggtagtggcctatattggaactgacaatgtattaggcggtgagctggccggggaatggatgacagaacagatcggcggaaaaggcaaaattgctattatagagggcggttcagggtcatccacgaacacagaccggctaaaaggcttccacagcgtaattgatcaatatcccgatatagaagtggcggcatctgtggcggctaattgggccagagatgagggcctgaacgccatgagtgatatcatagccggtaatccggacttgtcggcagttatggctatgaatgacgagatggccatcggcgccatggaagcgctaaaggctgccaacaagactgaggatgtgcttctgtgcggatacaatggggcgctggaggcgattcagaacgtctataagggagagatggcggcaactattgtacagtatccggaagagatgggaaagatgtttgttgagaatgcggttctgacgatacagggcacgcccccggaaaacaggcacattaagccccccatacagacaatgagcaccgtgtatctggagaaaatctacgactctctgcaggaaaattaggaggatgaattatggagtatgcaaatcagacaccgaggatagaagcggctcaggtggctctgggcagggaaccggcggatatggtaatcacagggggaaccctggtaaatgtgtataccggggaatactatcctgcggatatagccgtaaaagggacccgtatcgcctatgtgggggatgtgtcacatacaattggagaaaatacgaagagaattgacgccgcgggatgttatctgtgtccgggaatgattgagactcaccagcacgtgggaggctcgcagctgaccatgaccgagtttgccaaggcggtgcttgctcacggcactacaggcatcatcacagatttttatgagataggcattgccagaggaaagaaggctatacgcttttgtctggatgagatgaaaaagacacccttaaaacccatttatcaggtggcctcgcaaatttacgtacagaacggaccgtttggaaattccgggcaggtgtcggcggaagatttgtttgaattactatcttatcctgagtgtatagggatcagtgaatggcccgtgagcatgatgacagagaaggatgaggtggtgcttaagcttctggaggagacgctgcgccagggcaaaagaaatctggggcatgacagtgagactcctgaaaagacgctgcaggcctactgctgtcttggacattcctccactcatgaatgtgtggagtgcagcgaggccgtagaccgggccagactggggcttgccattatgacccgccagggcacggcggccagagacattgacaatatgagcaaaacccttgtggagaaaaaactggactccagtaattttatgatctgtacagatgaagaagaggttgcggaactgtattcccttgggcacctggactataaggtcagagggatgattgagaggggcgtggatcccatgactgcggttcagatggcgagcatacgtgcagccagatatgcgggagttgacgatgatatggggggaatcgcaccgggcagaatcgctgatattctgatcgttttggatctcccgcggtttgccattggcactgtgattgccaacggagagattgtggcggtcaactaccggtatacgggaagcatgcaggctccgaaatatcccgattttgcctatcaaacggtacagcttccaaagaaggctatgtgcgccggggattttgccgttgacgcgccccgggacgcagggaccgcaaaggtgcatgtgattggccagagaaatgggctgttggttacggaagcaagaacggcagtccttcctgtggagaacgggaaagttctgacagacagagagcaggatatccttaaggtggcgaaagttgaccggtaccagacttcgcggaagtggggcgtggggtttgtccagggttttggccttaaggagggggcaatgggcaacacctggaatggacaaaaggaagacatttttatcgtgggtgcctgtgagcaggatatggcagtggtggccaatcggctccaggagttaggcggaggctttgtggcagcctgtcacggaaaagtggtggcagaggtagctctcccattgttcgggctgctgtctgaaaaacccttcgaggaactggtaggagaagtcctcgggtttaacaaagtaatcagggacatgggttgtacatttgacggtcccatgacccagttggctctcatgggtgttcctgttgagattgggacactgaaaatgtcagaattcggacttgtggatgtatgggaaggcaaacgaattgatgtggttatagagtaagccaaggagttccgctttatccgggtatcccttgaaagcgggagaatatttcttacctgaaggtggcatacaggaagtgtggggacagcttgcacttgcggtgaaatatggtaatattgtcagtgtagccataatacagcaagcaggaagtccgcttgcatgccgttttacgataaaataataacagtagaggagaaaaggaatatggggagcctggatggaaaccgaaaagcaaatattgtagcaaacgaaatcattgatttaattttgaaatcagatatgaagccgggggacaagctgccttccgagagggaactggcacagcggttcggcgtggggcggccatctgtgagagaagcggtcagcgcactggtgatttcgggaattatcgacattcaccagggagacgggctgtacgtttccgatctggacgttgataaattaatgatgcccttccgtctctgcatggatttgggaaagtttaattatgaacagcttatggagatacgggaattatttgaacctgccgcggctgagatggcggcccggctgataaccgatgagcagatagaggaagtggaggccattgtgcgcaattctaacctggaaaatccgtacagctttgcagaggatgacagaaaattgcacaccacaatattcaaagccacggggaattatttgtttttacttattatgcagatcgtggacaatctggcgtctctgagcagagaggtaacgggacgctacttagaagtgaggaaggttgtccatcaggatcatatcagaatcgtccaggcacttaagaaaagggatgaaaaagcggccggagagtatatgaagcagcacattgagcacattagaatgattatggatctcaacgaggatgtttttaagtcggaatttttgaaggtaatccaaaatatggacagtgtagacttaaaagtggatccgtgagtgtaccgaaagcataagtgcctggcggattggaaagtcaggtgaacacatgaaagttttagattttcatattcatatatccgaacatacaccggttgaggaagttctgtcctttctggaccgtctgcagatggacagaggagccatactggctacagaccacggtccacagggaatccggcacgggacaaacgtatcctggaggaaggctgcgaatctggcaggggcgtcgggcggacgtctgtacgcagtgggttccgtgcatccggacagtgtcaaagagccggctaaggagcttgagacaatgcttgaatcgggggtgaaaggctgtaagctttatccccacagtgggttttacccggatgaccggcggctggatgaaatgtatgctttggcacaggataaggaggttccggtgctgattcatacagggataaaggctcataggtttcagcagatgaagtataatgaacccatctatattgataacatagcggtacggtttccccggctgcacattgtaataatgcacgccggctatccatgggtggaggaagcgcttcttgtggcaaagatgaatgagaatgttattattgatctcacctttttagatgtcctggaatatacctttgcccccggcctcacagagtctgtaatccggcgctgtatgcacagcataggggatcagaaaattgtctggggttctgagggtgagcggctcggactgagcgcctttgaggacaagggagctgaccgtgtgaaggagtatctgaatagaataaaaagcatggactttatatctgagggcagcctggacaggattctgtatgaaaatgcagccagattgctgcatgtgtaggaggataggatatgaattttagcggaaaagttgtagtaatcacaggatccggagtggggattggcagggccgcggctgtcaggtttgctgagcttggagccaaggttgtggtaaacgggcgcacggaggcccatggccgggagacctgcgggcgaattattgaggcagggggtgagtgtacctttgtacaggcagatgtctctcaggctggaggggcagaaaaactgatccgccaggcggtacaaatctatggaagagtggatatactggtgaataatgccggtgtggtactgcccggcaacgtggagacagtcacagagaaagattgggacacctctatggctgtcaatgccaagagctgttacctggtgtctaagtatgcggtagatgttatgcggcagaacggagggggagtgattgttaacaacgcttccgctgtggctgtaaagggagtcagagacagagccgcatatgcagcttccaagggagctgtggtagcccttaccagatccatggcagctgattacataaaggagaacattcgctgcaactgcatctgtccggggacaacggaaaccccgtctctggaggagcggatcgcagtgtttgaggatcccaaggcagccagagaggattttatcgccaggcagcccatgggccggttagggaaagatacggagatcgcagaggcaatcttatttgccgcatgtgaggaagccgcatttgttaatggtgcagttattatggcagatggcggaatgacaatttaaaaagaaatactgaaaaaggcctttgagatacatggcctttttctgaattaacaatcatcctacgtactatggtcaatattgactaataaacgtccccaggtttagaaagaatgcatgaactttccggaatccgacaaaatatgttgtaaaacctaataaaatcgggtaagatagattgtataaaaacggatacagtatacaaagtacatgcgaaatacaaggagagacacatgcgattaagagccttggctaagataaatttggggttggatgtagtgcgacgccgggaggatggttatcatgaagtccgtatggtaatgcagaccattaatatgtacgatcagctggacataaagcggaaaaaagcacccgggattgtactgacaacgaatctgccctatattcccacaaatgaaaataatcttgtttacaaagcatccaggcttcttctggaggagttcaatattcatgacggattggtgatcaatctcaggaaattcataccggtggcagcaggtatggccgggggaagttcagacgcggcagcggcaatggtgggggtcaaccgtatattccgcttgggcttgtcccagcaggagctgatggagcgggcagttgccataggagcagacgtgccctactgtataatgagaggaaccgccctggcggaagggattggagagaggttatcggctctgcctcccatgcccaaatgctacgttttaattggaaagccggggatcagcgtttccacgaagttcgtatatgaaaatctgcatgctaacgaccttgcctggcatgcggacatagatggtctggtggagggactgcataggaaggacttaaggaacattgcgggaaagatggagaatgtactggagacagtaacgattccaaactatccggtgattcaggagattaagaatcatatgaagagccacggcgctctaaacgcaatgatgagcggaagcggacccacggtcttcggactgtttgacaatgataagacagccagaaatgcatgccggcagctgaagaagagcagactggcgaaacaggtatttctgacgaccatttttaacaatggaaatggaggaaactacgcatgacaaatgatttccagatgcatatggacgagtatctgcctttgcgtgatgtcgtatttaatactctcagagaggctattctcacaggacagctgaaaccgggagagcgtctgatggagatatccctggccaaccgcctgggggtcagcagaacccctatccgggaagcgatccgcaagctggaactggaaggacttgttattatgataccccggaagggggcaaaagtagcctccatcacagagcgggaactcaatgatgttctggaagtacggatgggcctggaggagctggcaatcaagctggcctgcagccgaatggggaatgagtccatagaaaagctgaaggaaatctcagacaggtttgcctctctgatggaaacagacgatctgacggcccttgcccaggcagatgtagaattccatgagaccatatacagcgggaccaacaaccgccgtctggtgcagatactgagtaatcttcgggagcagatgtaccggtaccgggtagagtatctgaaggatgcaaaggccaggagaaccctgattacagagcatgaagcaatctaccgggcggttaaggcccgggatgaggaggcggcacttatggaggttaaaaagcatattgcgaaccagcagaaggccattatccgaagtctgcatttaaaagaatagaataaaaaggtaaattttgcacatgataagagagatacccagatacgggtatttctcttatttttttacgaggaggcggaagatgtcaacagtaagtgatatttccatgcatatacaggaaaatgaagaatacatccgcagccggtgtgagaactgcgacgatatcatcatacgccctatgcttctgggggatgaaaaaaaggtgcgctgtctggtagtatatatagaagttgctgtaagcaatatgatgctggaagagtctgtgatcggtaaactcatcaaccatatgtgggagatgcccagggaccagattctggagtttgtagaggacaacgggctgggaatctcagatgtaaaaacgttggataccatgaaggaggcattcgacgctatgctggccggaaatgccatattttttctggacggctatccccatgccataaagatttccagcaagggctatccggacagaggcgtccaggaggcggaagcggagaaggtactgaggggatcgaacgagggattcggagatgcggtgaaagccaactcagcgctggtaagaaagcgtctcagggacacccgtatgaaagtcaagcagaccagtgtgggagtcagatccaatacagtggtgcagcttctatacgtggaggatctcattgatcccggcctcctaaaggagattgaacaacgcctggagtcctttgaaattgacggggtaacggacagcggcattatagaacagcttacagaagaggtctggtattctccgtttccccagtttcagacaacagagcgcccggacaaggcggctatggagctgttaaacggacgtatacttttgctgtgcgataactcacctgtgggactgctgctccccaccacgtacaacagtttccttcaggtaagtgaggactggtataaccgatttgcgctggtgagctttctgcgcattctccggtatcttgcagtggtgctgaccatgctcctctccgccacgtaccttgccatgacaaactttcatacccaggtgcttcccaccaatctgatgctggcatttgcagagtccagacagggagtgccgtttcccagcatgctggaggtcatccttatggaagtggcttttgagatgatacgcgaggccgggatacggatgcccggaccactgggaggtaccataggaatcgtcggaggccttattatcggacaggcggctgtggaggccaacctggtaagccccatggtagttgttgtagtggccattacagccttaagttcactggccattccaaacgaggaattctctgcacccttccgtttgattaaatatggcatgatcgtcctgggggggactctgggtgtctatggcattgcccttggactctatctggtaatcagtcatctggcagggcttacaacctttcatattccttatcttatgccttttgtggccactaaaaaggagagattccgcggggagaaggacggcatcctgagggcacctatctggtggctgcgcagacgtcctatttacgccagacaagaagaaaaaatcagacttcgcagaagggagaacaagtaagatgttcgcagacaatcagaaaatatctcaccgccagcttttcaggcagctggttatgagctttttgggtatctatcttctgtgcattcccggatggcagtccctggaggggcgtcggggagtactgtgtgtagggatcggtcttcttttccttttcttttatatcatttatctggtgcgtttgaatcattcctataccaatctcgataagacattcggaaagatcggaggacggattattgttctggtatatctctcctatctggtctttaccgggatctttcttctccgcatcatcgcagcggtggtagcacgctttcttgtgacaggcgccaatgcggtgatggttatggggctggcagtggtcttctgctatctgggcagcggccagggcctggagcgccggggccggatggcagaggctgtctttcccctggtggtaggggcgctgtttcttatgttttttctggccctcagcaaggtaaatttgggatacctgcagcagagtgcttctgtcagctggccccagctgggctggggaagctatgggatcttctgtgcctttgcccctttgatcctgattccttttactctggggacggttcagaagccgtccagcgcccacggggtcataataggagcagtgggacttttgggcggaattctgtccctgacctttatccttctgcaggggacctttggtctgcccggtctgctttacaaatcctttcccatgatagatttgatgtcaggggttaatatacccggagattttctggagcgcgtggatgtattctggatcatatttctgatgttcagtgtactatttgctctgggaagtgtgtttttttaccagaatgagctcttgtcccgagtacactgggaaaagggaaggctgtttgcagcgtttctggtgctggcaggggggcttgtctgtgcgcatatgggcgtgtcggccagatactacggccagattctggagaggtattacatccctgtgtttctgctgatcagcctgattgccgggctgcggctgggaaagaacgagaaaaaggcaaagtggggtaaggcactcatagggattctgggactcatccttttgttctttctgaatggatgctgcggtgtagagccggaaaaccgggcttttcccctcatcgtgagcattgactacacagacggggaatataaagtaatctacggaattccggatctgtctaataccacaggccagggaaagaaagaggaatccggcagtcaggagccgcgggttactgtctataccggggcatccatcagggaaatagaagaagagttcgacaaaagtcagaaaaattatctggacctggggcacgtgaaggcatttatgctgggagacgggctgatggaaaataaggaggcatttacgaaatgtcttgcctatctggaaaataacccgacaattgcgggcagcatcaaagtattccaaagcagccaggtggaagaggcaatgtccctgaacggaaatgagattgattctctgggggaatacctcataggaatactggaaaataagccgaacccagacagaaaggcccaggtcaccatacagaaattctacaatgcctggcataaccaggaggagttccccaaggtacccagagtaaatgtgaggggaacccaggtgtaccttgaatagacccaggataaatggaaatactcctaatacaaagttattaggaggtacataaaatgaaaatcacggcaaaccgtaagagatatatcatagcagctgcccttaccctgggcgttttgggaggaattctggctgcttcctttaccgcccgggcccaggaagaaacgccccgtcagatccagcaggggattgctaaagagatcattcggttccatgtccttgccaacagcgacagtgaggaggatcagggactgaaaatcaaggtgaaaaacagagtagtagagtatctgcacgagcttttaggcgatgacaccaccctggaagagaccagggaagcaatcgtttctcatatggaggaaattcgggacatctccagggaagtgatcaggagagaagggtatgcgtatccagtgacggccgggcttacaacggcttatttccctgaaaaaacatatggggactgtacctttccgccgggggaatacgaggcgcttcagattaaaattggagaggcagagggacataactggtggtgtgttctttaccccagcctgtgctttgtagatgatacccatggagtggtcacagaggagaaaaaagaggaattgaagaacgttcttacagaagaggaatatgatacaatcacagataccccgaggattaaaattacatttaagtggctcccccactgataatttccgcttgaattctcccttcagtgagagtagaatagaacaatgtataaaaccttagcctgaggccaggctaataaatgatggagaaagaatatgagccaaaagaactacgcacccataggagtatttgactcaggagtaggagggctgactgtggcaagggaaatcatgcggaatctgcccaatgaaaaaattgtatatttcggtgataccgccagagttccctatgggaataaatcaagagaagctgtcctgcgctattcccgccagattatccgttttctgatgacccaggatgtaaaagctattgtggtggcctgcaatacagccagcgccatggctcttgagaccataagagaagagatcgatattcctataatcggagtggtaaagcccggggccagagtggcggcccaggtaacgcggaaccataagataggagtgatcgggaccagggctacgattaacagctgcatctataaggagtttattcaacggcagaaccctgagattgaggtaattggaaaggcctgtccgctgctggtacctttggtagaggaaggatggctgaaggacaccgtgacagtggaggtggcaaagcgttatctggaacctcttttgatgcaggatatcgataccctgatactgggatgtacccactatcctttgctgcgatctgtgatgcgggagctggtgggagaaaaagtcacgctggtgaatccggcgtatgaaactgcaaaggacttgcagaggctactggaagagagaggtctggcaagccccgggaaggaggaagctgaattcccctaccgcttctatgccagcgattctgtgcagcagtttaaagactttgcgaattccatacttccttatgatgtgagtatgacaaagcagattactattgaggagtactaaagaatgacaaagcaagtattgattacaatcaaagggcttcagatgccgggaggcggggaagaggatacgaatatagagctgattacagccggagattattataaaaagaacggacatcattttattatgtataatgaggtgacggaaggctttgagggcagtacaaagaactatataaaagtgaaagaagattctgtggaagtaaggaaaaagggagttgccaatgcccatatggtgttccaggagaacaagaaaaaccttacatactactctactccctatgggagtatggagatgggaatctccgcaacccgggtaaaaattcaggaaacccgggaaaatatagatgtgaatgtagactacgcgctggaaattaatgaacagcatgtggcagactgcaatatctgcattaatattaaatcaaaagaggctcaggacttttcactgagatcataaaaggattgcggacagagccgcaatcctttttttcatcctatggccggttaggagcgttttccagtggtggcatccatagccttatttctcaggcgctggaagaagcctttctttttggccggtgcttccagaggacctctgacaccccggacatctgtaatgtagattccgctgatggtagctttgacttcctttttcagagggattacatcgaagatcctctcatcgcagaccaaagtcataatcttggggcccacttttgcctttacaataggaagcttggatcttctcataagcttgggcgtctgatctatcactgcctgagggagccccgaagtttttaggggcatcctttttttatctataatcagcatggggacgacttgtttcgcagcctctatctgctcctgctgtgcttcttgctttttctgtgctctttttcccaggaaatataatacgacaacggcaactgcaagaatcgccaaaataatcaataatactttccaaagttccataattaacctcctaaagtgtattgaatccactgccccgcagtttcatacgcaaatttcattttagcattaattctagaaaaaggcaattattaatttgccaaaaaaaggcggaggaaagggcgggaaagggagctgtgaggcataagtagacaaagggtcctaatagattagaatagtggcaaggaggatatgggaggaatctttatgaaggaccgtggcgttattcttactggggtttgtctgcttctcctattggcggcagtacaccgatacgatatccagggtactgaagatggcgaaagagagaccggcataagccaggctgctgcgcaggcaggcggaaaaaaggggataatggaggaggcaaagctgctggcagcaggctatgactacgacggtgcggtatctctgctgaaaaaggcccccggctatgcagaatcaaaagaaatgcaggaggcagctgcgaagtacctggccaggaaagaagactgcagacctgcggacgtggagaagattcctcatattttctaccattctctgattgcagatacttccagggcttttgacggggacagcagagaaggggcctacaatcaggtgatgacaactgtcagtgagtttactaaaattatggaacagatgtatgagcggggatacgttttggtaaggctaaaagacctggcaggggaaaagacagatggaaatgggagaacctatatggctttggaggagatccttctcccagagggaaagaaaccttatgtgctctctgtggatgacctcagctattaccactatatggacggggatgggtttgccagtaaaattgttctggacggggacggccggccaaagtgccagtataccgccgcagacggaacggttaccgtgggggattatgatgtggttcccctgctggattcttttttgagggagcatccggacggtgcctataaaggagccaggggaaccattgcccttaccggttataacggcgttttaggataccggacagacacggcatatgagacaggtgaaaatctggatgaggatcagaagaagtttctggaggcaaatccggatttcgactatgaaaatgaggttcagaatgcaagggcggtggcagaagggctgaagaaggacggctgggagttcgccagccacacctggggacatctgagagcctacagctgcagctatcagcagatggtggaggatacaagaaagtggaagacaagggtagcccctattgtgggggacacggatgtgattatctttgcctttggggaggatatcggggactggcacccctacacccaggagaatgaaaaatacaggtttttaaaaagccaggggtaccgttatttctgcaatgtagattccaatacctcgtgggtccagattaccgatgaatatctccggcaggggagaaggaatgtggatggctaccggatgtactatgacatgacggaaggcaccaataagctttctgacctgtttcaggtggaggaagtattcgacccggcaaggcccgttccggtgcctcctatgggagaatgaatgtgaaaaaattatgaaatggacgggaaaggctttctttttaaggccatgtatggtataacacatgtgtggctttaacttgaaaagcctctgtcttgaaacaagataagactccccgcttgcagaaagtacgccaaggcgtacttgaaattgtacagatttatacgataaccgggagcctagaaaggatgaaaatatgaaaaaaaggggtacattaatcgcgctggctctgtgtacagcgctggtgtttaccggatgctcaggcagcaattccaaagatggcaaggacagcaaaaatacaggagaaaaaattgacatatctgatatgaaggattccgacgacctggtaaaggcgctggaccttaaagatttgggcaaatatatgactctgggccagtacaaaggactggaaggcactaagatggtgtatgagattacagatgaagatgtggatgcccaggtaaacggtacattatctcaaaactctgctgtggtgacagaccggccggttcaggacggggatattgtcaatattgactacgtgggaacggtagacggcgtagagtttgaagggggaaagggacagaactatgaccttaccatcggatccggtgaatttatcgacggatttgagacaggccttataggagcaaccacaggacaggaggttgatgtcaatgttaccttcccggatccttatcaaaataatacggatctgtccggtaaagatgcagtttttcatgtgacagtgaattccatctcagcacctccggagcttacggatgagtgggtggcggcaaacacagaatataaaacagtagatgaatacaaggcgtctatcagaaaaatgattgaagacagcaatgacgatcaatccatctattaccttgctacgtctctgttcagccaggtacaggagaactccgagatcaaggaatatccggaagatctggttaagaaagaaactcagaattataaagatcagatagaatctatgtatgcagcggctgctggtatgaccatggatgagttcattgaggctcagggttatacagaagagacttttaacgagctggcagaggaaaagggcaaagagcgtctgcagcagaagatgatcgtacaggctattatgaatgctgaggatatgagaatcacgcaggaagattatgataagatggtagaagactatgcacagagatatggatttgagagcaaggatactatgatccaaagctacggggaagatatggtaaaggatactattctctggaataaggttggggatgtgctggtcgagaacggtaagattacggatcagacagttgatgagggggaagcagacaccagcggcgcatcccagggcgaagcggacgccagtgacgatgcccagcaggaagagacagcggaataagccagaacacgaatcggatctttaataaacccggtgacaaacaggcgtaaagtaagatagcccgtttgtcccgggctttttcatgagaatatttcccatttattaccaaaacataacattaaattacaataaaggttcaaatttcttcatgaaaggcgttgtaagaaaaagaattatcgattataataagcatgatatgcaaaatactggaagttaaggagtatgacaatgtctgttttatttatagaatatccaaaatgcagtacctgccagcgagcaaaaaaatggctggacagtcacgggattgaatatacggatcggcatataaaagaagaaaatcctaccagcggagagcttgcagagtggtacagaaaaagcggactgcctttgaagcgcttttttaacaccagcggaatgatttatcgggatatgggactgaaagataagcttcctacgatgacggaagaggagcagctggagcttttgggtacggacggtatgctggtaaagcggccgctgattataggggatgattttgtactgacaggttttaaggagaaggaatgggaagacgccttgtgtagctgagcagagggaacagtatgacttatacgattgcgggagttgttggctttttattattcgtattatatgatataaacagtgtgctgtggagaaggaaaagtctccactgcggcttttttgcggggaatgtgcttattataggtgcaaccataatgttgataaaaagagtatggaatgaggcgtttgtgtcaatgggttctgtcttgtggggcctgttggcactgttctttttagggcttctcatttatactctattttttgccctgccatttggggatacgtatcagaccatggacggcagaccccaggtctgcagcgcgggggtgtatgccctgtgccggcatccgggggttctgtggtttttctttttttatctgtttctgggtctgtctcttcactccctgcagcttgtgggaacaggaatggtgctcagcctgtgcaacctggggtacgtgattctgcaggatatatggacgtttcccagaagtctgggcgggtatgaggagtataaaaagagcactccttttttaatccctacgaaggggagcattatggcttgccttactacactgcggcaaagggggcggaaggaacatgaggtttgaagaaaagttaaaagaatttccaaaagaagcgatatggagcgagtactgtggctttttggatcttgatatcaaggagtatatgcagatacaaaaccggctcttattagaacagatccgtctgtggagcagatctcccctggggcaaagctttttaaagggaaaatatccgggaaccatagaagaattccgcgctatggtgcccctaactacatatgatgactatgcagatgtactgctggccagaagaaaggaaatgctgccggaggagccggtaatctggattcagaccacctgggagggcggcaaacatcccataaaggcagcaccctacacccagggaatgctgaaaacgtatcagaacaatgttctggcatgtctgattctgtccacaagtaaccggaaaggggagtttgacgtaagtcctgcggacaatatcctgtacgcccttgcccccctgccctaccctaccgggctgtttccggttgcccttggggacgagatcggcattggctttctgcctccggtcaaggatgccgtggagatgtcctttaaggagagaaatgtaaaagggtttcagatgggactgaagaagggaattgagtttttcttcggcatgggaagtgtggcctactatgtaagcctgagcgttgctgccatgggaagcggcggctcctccaaaggactgaaaaaactggcggggatctccccgtctatgcttctgcgcctggctaaggcaaagaaaatatgcaaagaggaaaaccggcagctgaagcctaaggatttgtttcagctaaaaggttttatgtgtgcaggcacggacaaccggtgctataaagatgacctggaagacctctgggggatccgccctatggagctttttgcagggacagagcccagctgcattgggacagagacctggaccaggaatggaatgtatttttttccggacacttgtttctatgaatttattccggaggcagagatggagaagaatatggaagacagtacttaccagccccgtacggttctgatgaatgaggtacaggagggcgaaaagtatgaactggtacttaccatctttaagggaggggcttttgccagataccgggtgggagatgtataccggtgtgtggggcttacgaacaaagaggacgagacaaagattccccgttttcagtatgtggacagggtatcctcgatcatagatattgcgggatttaccagaatctctgagtattccataacccgggccatagagttgtccggacttccgatcaaggactggatcgcacagaaagagtataaagataaccggagacctgtattacatatgtatttggagatggaggccggctgtctggccaaccacgcggtaagtcagatgatcctgaaagagcatctggggatttattttaaatatattgacgaggattaccaggatctgaaaaaaattctgggaatggatcctctggaaattactatattaaaatgcggcacgtttgaccgctgcagactggagacggggaaaaatatccggcatatgagccctccagcccgggaagtacaggacctgctgcgggcagagtatgacaaaggagggataggacgtgtatagctatgcgagtgtgccgattattgcactgttttgttattccttccttctggtgtccttcctggctgccagaaaaaataagattattaattcttttattggcctcttagttattatgattatgtggaccggtggctccttttttatgcgcatggggctgtggccctatgaaaaattctggtttcatgtatctctgatcgggatgatgatgatgcccgtgggatttttgggatttatccgggaattcatggaggttaaaagtaagtaccgcaaagggttctggtctgttcttgttctgatcatcatggccgtgaatataaaaacaggagtctttgtagatgcaccgcagatgaaggagatagccacggggcagataacctatatttatgatattcactggccggtggttgtcctctttcttacagaagcgtttatccttcttgactgtgccgggatgatttataagaacgggcgccgcaatgctgtggttaggaagaaactcaatccgatcctgctggggatttttatccttttcctgggacatgtactgcttgtattcccgctttttaaaggatttcccattgatctgatgagcggaattatcaatgcctttctaatgttttatgcactgtacaaaaaacgtttgtttaagcttacacttttgatttccagagggaactgctatgccctggctattgttctggctgtagtaatcttttataatctggttcggcctttggaggaactgctgagcggactgtttcacctgggagattcccagagagttatggcgatcgctgtcctggtaatgctggtaaccatgggcatgtatgcgatacttaaaaagttttttgacgaactgttcgtgaaggatgaactggttcagacggagaatctccgggactttagttcgaaggtatccaaatccctgaatatccaggaaattcttacagaattgattgaaattatacagaaaacaatttctgtggaaaaggtatatatctgcatacaggacgaccagggggaatataagatggtgcagagcaccagtcccctcaaccgacgggattttgtgctggcaaaggatcatcctgtagtagaatatctgaagaaatcagacggatgtctgctgatgagggaatttaaacggacggttgcctataaatctatgtgggaagaggagaagcatcagctggctgtctggaaaatagaatgttttgttgccttaaaggatgaagaggatatcattggtatcgtcatgctgtccaataagctgaagcatgagaggtatacctataatgatattagctttcttacctctgtagattccgtaagctctattgcggttaagaactcaaggctctacgaaaaggcttatgaggaggccaggaaggatgagctcaccggcctgctcaaccggaaatgcttttacgaggttctggacgaggcctatgaaagatttaaagacagttccctggcgcttattattctgaatatagatgattttaagctgtataatcagttgtacggggaccaggagggggatattgccctccagaaagtggcggccattatacaggcaagcgcaggggaaaaaagctatgtggcaagatacagcgggaaggaatttgccattattctgccccagtatgatctccacatggcgaaaaagctggcggaaaacattgcggcacagatccgggatatgaaccggcactccaaagaatatgctctgaaggctcttactgtaagctgtgggatctgcggaattccattttcagcctccaatcctcacgagctggtaaacaatgcggatatggcagtctatcatgtgaagcgttcaggtaaaaatgctgttatgatttattccgtgggccaggatcagaagtttgctatgcaggcgcctgaaccggcatataagaagagtgtgtactcagaatatgcatctaccatctatgcccttacagctgccattgataccaaggatcactataccttcagtcattccaagaatgtggcatactatgccagcgagctggctaaggcgtacggcatgaatcaggaatgtgtcaatattgtgcacgaggcggggcttctccacgatatcggaaagatcggtattcctgaggatattctaaacaaaccgggaaagcttacggacgaggaatacgaggttatgaagggacatgtggagcattccatcggaattatccgtcacctgccctctctggattacgtcattcccgctgttatcggacatcatgagcgatatgacggaaggggatatcccagacggattgcgggggaagatattcctattatggcccggatgctgtgcgtggcggattcttttgacgctatgatttccaagagaagctacaagccaagtatggaggtggacaaagcgctggggattctggaggaagaggccggtatgcaatttgatccgaagctggttcctatttttatagatttggtgaagcgtcaggtcattgaaattcagctggactgaaaaatcttctttcttcttgacagaaaaataaaaatatgatacgttatccattgtatggatgatagttcctgaattagagctttccatgcaaatattttttgaccactcgttaagagttaaggccatacggacagccgggtcaactgccgattggcaactttcgttgccttattgattgagttaaaagctcaaattttataagttggttactcaaaaccagtgcatagctgcacatcaacttgtgaaacggtcaataagagtggtaaaagtaaaatgtttgctatatagactctaattctcaactgcattttgaataaataggaacaggggggcctgcaggccatagcctctgttttcaaaataaaacaaaatcagaaaagacgatgaaacgcaagtgatgggcggtagactgcctgttgcctgcgtttttttattatataggaaactttgttccctatgcaataaaaaccctccgggggatcacactgcggcagaccatccaatttgcggactcaggactgcatacaggcgtctattgcacataattagctgaatagaaaggagaggaggccaatgagtctttcacaggaaaaggcccctgtctacgaggcactggaggaattcaggcggatgagagtggtcccgttcgatgtccccggacacaaaagagggcgggggaataaagagttaagggaatttctgggagaaaagtgcgtcagcctggatgtgaattccatgaagcctctggataacctgtgccatcccgtatctgtcatcagggaggcagaggagctggcggcagaggcctttggagcgtcgcacgcctttctgatggtggggggcactacctccgcggtacagagtatggtgctgactgcctgtaaacggggggataagattattcttccgagaaatgtccacaggagtgtgattaatgctttggttctctgtggagcggtgcctgtgtatgtcaaccccgatgtggatcatcagcttgggattgccctggggatgaaggtgtcccaggtagaacaggcgattacggagaatcccgatgcagtggctgttcttgtaaataatcctacctattacgggatctgttcggatataaagtccattattgcccttgcgcatgcccatggaatgatggtgctggcggatgaggcccacggcacccacttttattttggggaaaatctgccggcggcagctatgaaggccggtgcggatatggcggcggtgagtatgcataagtctgggggaagccttacccagagttctcttctgcttacaggaccagaggtgaatccgggatatgtaagccagataattaatctgacgcagactaccagcgggtcctatctgcttttgtccagcctggatatctccagaagaaatctggcgctccacggaagagagacgttccggcaggtggtggagctggcagaatatgcaagagcggagatcaatgccataggcggttattatgcctactcccgggagctggtgaatggggacagcatctatgattttgatgtgacaaagctttctgtctataccctggagatcggtttggcggggattgaagtctatgatctgctccgtgatgaatatgatatccagatagaattcggggatatcggcaatatactggcctacctgtctatcggggaccgcagacaggatattgagcgcctggccagtgccctggcagagattaagcggctgtatcagaagagcaggaacggtatgatgagccaggaatacataagtccccaggtggtggtaacgcctcaggacgccttttatgccaggaaagaatctctgccgctgaaagagacagcgggaagagtgtgcagtgaatttgttatgtgctatcccccgggaattcctattctggctccgggagagaggattacggataagatactggactatattgtgtatgccagagaaaagggctgctccatgaccgggcccgaggatgagaagatagaagcactgaatgtattgctatagagacctgtttttgagaggacgcaaaaggtccgcaggggacggggattttaggaaaatatagaagataaggagaggtggaaaatggaattatggttttcagagcgtcatacccagaatgtgaagttttccattcgtgtagagagacagctttacagcggacaaagtgaatttcagcggattgatgtatttgactccagggagtttggacggtttctgaccctggacggttatcttatgctgacagagaaggacgaatttatatatcatgaaatgatgacccatgtacctatggcagtgcatcccgatcccaggaagatcctggtaatcggaggaggagacgggggcgtaatccgggaactgaccaggtatgaaaagatagagcggattgatatggtggagatcgaccctcttgtggtagaggtatccaaaaaatatctgccacagacggcctgccggctggacgatcccagggtacatatctattatgaggacggcctgcgttttatacgttctgtgcacggggaatatgatctcattattgtggactgttcagatcccggggggcctggggaagggctgttcaccaaggagttttacgggagctgctataaggctttgaaagacgacgggattatggtaaatcagcatgagagccccttctatgaggaggatgccatgactatgcagagagtacacaagcgcattgtggagagctttcccatcagccgggtctatcaggtgcatgtgcccacttttccggcggggcattggctgtttgggtttgcctctaaaaaataccatccggtccgggacctggatgctgtcaaatggaatatgcttgggctttccacccggtattatacgacacagctccacgcaggggcttttgccctcccatattatgtagaggagatgctgaagcatgttgaataagaatatagaagtatttatcggctgtgaggcggaatatgaggaggcagggattgtgctgtacggggcaccatatgattccacgacttcttaccggcctggggcccggtttggaagcaaggctatgagaagcgaatccttcggcttggagacttacagtccctatcaggataaagatttgacagatctgaaagtttttgacagcggtgatctggagctgtgcttcggagattcctcccttgctctggaagacatagagagacgggctgaggagattctggaggacgggaagctgcctgtgcttttgggaggagaacatctggtgacccttggagctgtcagggcagtgttcaaacggtacccggatctccatatgattcattttgatgcccacgcggacctgagggaggattacctgggcgtaagactgtctcatgcctgtgtactcaggcgctgctgggaacttctgggggacaaaagaatccaccagtttggaatacgctcaggggatcgggaagagtttcgctggggagccaggggccatgtggataccagaaaattcgattttcagggacttgcggagacggtagagaaactaaaaggtaagcctgtgtatttcaccctggatctggatgtgctggatcccagtgtatttcccggaacggggacaccggaggccgggggcgtaacctttgaccagctgagggacgcagtggagctggtttgcaggggcacgcaaattgcagggtgcgatatggtggagctttgcccggggtatgaccccagcggaatttcaacggcagcagcctgcaaggtactgcgggagatgcttcttgcactgaaaccacagagacaggttattacatagaaaaggagaatataagtatgggaaaagcgttgattatcggctgcggcggtgttgcatctgcagccatccataaatgctgtcagaacagcgaagtatttacagaaatctgcattgccagcagaacaaaagcaaaatgtgatgcactgaaggaaaagctggagggaactacaagcacaaagattacaaccgcacaggtagatgcggaccatgtggacgagattacggtactgatcgaaaaggaaaagccggatgttgtgctgaatctggcgctgccctatcaggatctcaccattatggaggcctgcctggctaccaaaacacactatatagatacagcaaactatgagccagaggatacggccaagtttgaatataaatggcagtgggcctacaaagagaggtttgagaaagcgggaatcactgcccttttaggaagcgggttcgaccctggagtgactggtgttttttctgcatatgcccagaagcactattttgatgagattcattatattgacatattggactgcaatgcaggggatcacggatatccctttgccacaaactttaacccggaaataaatatcagggaggtatcagcccggggaagctattgggagaacggaagctgggttgagacggaacctatggaaattaagaaggtctatcattttccggaaatcggggagaaggatatgttcctgctccaccatgaagagctggaatccctggcgctgaatatcaaaggcattaagagaatccgattttttatgaccttcgggcagagctatctgacccatcttaagtgcctggagaatgtggggatgacatccattgaacccattgaattcgaaggaaagcagattgtgcctctccagtttttgaaggctgtgctcccggatccctcgtctctgggaccaagaaccaaaggaaagacgaatattggctgtattttccggggaataaaggagggaaaagaaaggaatctttatatctacaatgtatgtgaccaccaggaatgctacagggaggtaggctcccaggcagtggcatataccacaggggttccggctatgataggcgccatgatggtaatgacgggcaaatggcagaagccgggggtattcaacgtggaagaattcgatccggatccctttatggaggctctgaaccggtgggggctgccgtggaagacagaggagcagccggagctggtagactgatatgcgctgggaacaattgcctactccctgctatgtagtggatatatcccggctaaaggggaatctggaaatactcaaaggagtggcagaccgcaccggatgcgagattcttctggcacagaaagcattctccatgtattccctgtatcctctcataggagagtacttaagcggctgtactgccagcggactctatgaggccaggctgggggctgaggagatgggaaaagagaaccatatctactcccccgcctacagggccgaagagtttcccgagatctgcgagatctgcagccatatcatctttaattccttttcacagctggagaaatacggccctgtggccatagaacggggaagaagcgtgggactgcggattaatccccagtactccacccaggaagcacatgccatctacgatccctgtgcaccgggttcccgcctgggagtaactctggaaaacttcaggccagatcttttgggaaacgtagaaggccttcattttcacaccctgtgcgagcaggatgcctatgatttggacgccaccctggatgtaattgaggaggcgtttggcccctatatggaaagaatgaaatgggttaacttcgggggcggacaccacatcacaaggccgggttatcacatagaagtgctggaaaaatgcatccggcggatacagaaccgttaccaggtacaggtatatctggagccgggggaggccattgccctggatgcgggctatctgatcaccgaagtactggagattgtaaaaaacggtactgacaccgccattctggacacatccgccgcctgccatatgccggatgtcctggaaatgccctatcggcctccgctaagagagagcggagaacccggggaaaaatcctatacctgccgcctggccggacccacctgcctggccggagatatcataggcgactattcctttgaccacaggctcaccccgggggaacggctggtgttcgaagacatggcaatctactctatggtaaaaaacaatactttcaacggcatgaaactgccggggattgcaatgctggaagaagacggggagtgcaggttagtaaaagaatttggctacgaagactttaaaatgcggctgtaaaggtataaaaggggacgtgtactttctaaaaagaacacgtccccttttggggataggcctgtccctaactgccataaaatgtataaaaaccctgatttgagcagatagtataacagaattggcaaatagaagggagtttttgttatgctgctgattaacggtagagttttaactatggcaggaaaggtttgggagaatggttatgtccgtacagagggaaaggtgatcgcagacataggaagtatggataccatatgtgtcaatgacagtgaggaggtaattgatgcctgcggcggatggattatgccaggcctgattgacgcccatactcacatggggattacggaggagcgcaagggaaccataggagatgactgcaatgaaattacagatcccattactcctcacctcaggggattggatgcggtgaatcctatggactgtgccttccacgatgctattatggcaggaatcacttcagttatggcaggaccgggaagtgcgaatgtagtgggcggtcagtttgtatttatgaagactcacggacggtgtattgatgagatgtgtgtactggagccggctgccatgaaagtggcattcggggaaaatccaaagacaaattatggagatcagggccagtcccctgctaccaggatggcgattgcagccatgctccgggaggagttgtttcgggcaaagcagtactgggaaaagaagaaaaagggaaaactctcagagaaggatttccgcatggaggcctggataccggttctggagaagaagatacccatgaaggcccatgcacacagggcggatgatatactgacagcaatccgcatagccagggaatttgatgtggatataactctggatcactgcaccgagggacacctgattgccgaggaagtggcagcgtctggattccccgccatcgtgggaacagatcttacctcccgttcaaagatagaagtggaaaatatgagctttaaaacctgcggggttttggagaaggcaggggtgatggttgccgtcacaaccgatcatccggtagcgatcatccggtacctgcccctgtgcgcagggatggctgtgcagcagggcatgtctctggagggcggtctgaaggcactgaccattcatcccgccaaaatctgccgggcagcggatcgggtaggcagcctggaagtgggaaaagatgcggacattgccgtatttacaggaaatcccatggaagtgtttacggagaccatctgtacagtgatcgacggggaggcagtctatcgccgggagtaaacgtaattttaaatggtaatcttttcggaaattggcgaagtcttacagcagggcttcgcctttttgtcaatgcatgctatactataccaaagtcaaaaaacttggaaaatctatgcccggggagaaatgtgcatcctgcgtatgagtacactacgcgggcatcgatgtagaagccggaacagacaatgatagaaatttttggagaagactatgaagcaaaacggaaaaccagacaggaccttgctggagaatcaggactacaatttcataaaaaccgacaaacatttaggaaaacatgtgatccttctgggacttgcaggcagttattcctacggtaccaacaatgagagcagcgatatcgatatccggggaatagccctgaatcaaaagtctgatctcatcggtatgacaaactttgagcagtatgtggatcagaaaacagatacgactatttactcttttcggaaaataatcaccttgcttttgaactgcaatcccaataccatagagcttctgggactaaatccagagcattacctgtatctgaaccaaatcggagaagagcttctcgcaaaccgcagcctgtttctgtcaaaacgggcagtacattccttcggaggctatgcggatgcccagctcagacgcctccagaatgcgctggccagggattcctatccccagcgggagaaagaacttcatatctttcattctgtgagaaacgcgatgtacgagttccagaaccggtacagcagctttgaaaacgggagcctgaagctttatgtggatgtatccgggaatcctcagctggagacggagatatttgttgacgcgaatcttagacactatcctttaagagattataaaaacatctgggcagagatgaataatattgtgagagactatgataaaataggcaaaagaaacaagaaaaaagacgacaatcacctgaataaacatgccatgcacctgatccgcctctttttgatggccattgatattctggagaagggggagattcatacgtaccgggaaaaggagcataacttactattatccatccgaaacggggagttccagaaagcggacggcaccttccgttcagaattctatgagatgctgacaggctatgaaaaagctctggaacgggcagcccgggaaaccgcccttccggatgaaccggacagggaagctgtggaggcgtttgttatgcgggtgaatcgaaaagtagtgacagatgaaatataaacggaggacagatatgacagaaagagaaaagatgctggcaggagaaatatatgactgcggagatacggagctgttgaagcaatggcacaaagcgaaaaacctcattcgtgagtataaccagacgggttcagagtgtttggaggaaaaggacaggattttgtgtgaattattaggggcacggggggaaaacctctggattactccgccattctatgcagattacgggtgtaatatatccttcggcaataactgcgaggtcaatatgaactgtacgttcctggatgataacaaaattatcataggcaacaatgctcttattgcacctaatgttcaaatctataccgcatatcatcccgcaaatgcccgggagcggtttggggagctaagtgaaagcggcgggtttgcattctgtaagacccaatcggcaccggtaattatcggggataatgtgtggattggcggcggggcgattatcctgccgggcgtgaccattggaaataacgttgtgataggcgcgggaagtattgtgacaagggagataccttcggacaagattgcatatggaaatccctgcagagtaatcagggataatctataaacgcagcatcagccctatagttctaaaaagtatagggaaaatattcccctgcaacggctgctttttcaggattttttatccgggaagaaggggaacctgaaagagccattctactgacatatacggattctctcctgcatacattgtaaaaacaagttttccggaggacttccgtgaaagaatatattgaagaacgtgcggtggacatcgccaattacattatagactgtaatgcgacggtgcgtcagactgcgaagaaatttggggtttcaaaatcaacggtacataaagatgtaaccgaacgcttattgcagatcaatcctacgcttgccagaaaagcaagaaaagttctggatgtaaataagcaggagcgtcatatccgtggcggaatggccaccagagaaaaatatttgcataaagccccctgattgtcttgctgcacataagaatctgcctatcatgaatcaaactgccgcagccatattccgtcagaatggctgcggcagaatgcttatagcttgtggcactgttcaacattaaggacaaagatggtggcccctcccacgtcaaccggaatcgagggaatcgcggcataattatagccgttggagctttccggatatggggtaggataagaaatctgcttcctttttccgcattcctcagaaaaaatatcaagcacctgctgtatctgatcgtcctgtacaactgtaaaaagagttgcatttctcttacggagaaaacctccggtagtagaaaccttggtaacggcaaagccggcctggttcagggcatacataacattattcacatcactggcacataccacagcataaatcattttcataggacatctctcctctcctgccaatggtttcaaaaagctaactttccgtactattataaaacttgactctcccttccgtcaacggttaagtttttataaagaaaaccaggaaaaatattccctccgccctattgtaaggcaaaggggatagcagtataatgtgagggaaatgttaaaaatgcgttaagataaacatttttgaggagagagaaatgaattatatgtttagcaacaaggatctgaggaggctaatccttcctctgatcgtggaacagttcctccagtccttcgtaggactggccgattctattatggtagccagcgtgggtgaggctgccgtatccggcgtatctctggtagatacggtcatgattctgttaattaatatatttgctgcccttgcgaccggcggagctgttgtagccggacagtttataggcaaaaagaaacaggacatgggctgccaggcaaccaaccagctgattttatttacggcatccttttccctggtgattatggccttgggttatctgtgcagaggatttatccttcacggtgtcttcggaaaaatcgaagctgaggttatgtacgatgccaatatctatctattgattgtatttgcttctattcctttcattgccctgtataacgcaggcgctgccatcttccgcgccatgggaaattccaaaatgtccatgcagctgtccatgattatgaatgcaattaatctgggcgggaatgctattcttatctacggactgcacagaggtgtggaaggagttgccatccctactcttgcgtccagggtcattgcctgtatcctgatgatgattatgctggtggatcccaggagaacccttcatattgtaagacccttccgcattcatatagacagaatgctgctgaaaaagattctctacattggtatccccaacggcctggaaaacagtatgtttcagctgggcaagattctggtgctgagtatcgtggcaggcttcggaacgtcgtctattgccgctaatgcagtgtccaacaatatcgctatgtttgccatcctgccgggcatgtctgtgggatttgcgctgcttaccgtaatctctcaatgcgtgggtgccggggattaccagcaggcaaaatattacacccggaagctgatgaagatcacctatctggccctgattgccattaatatactgctgatgctgatcctgcctctgattatccgcatctacggcctgtcccatgaggccagcacctatgcctataaaatcctgatttaccattcgatctgtgtggtaactatatggcccctatccttcactctgcccaatacactgagggcttctaacgacgtaaaatacactatggttctggccattatttctatgtgggtctttcggattggcttcagctacattctgggagtgaacctgaagatgggagtattcggagtgtgggtggctatgaccatagactggctgttccggtccattgcctttgtatggcggtatctcagaggaaagtggcaattgcagaaaatataaaatttaccattgtcaaggagggagagctcctatataatgaggtacagatccatcggacggatacagtatgatggaaaacaaacacacaggaggaattattttgaagagagagacagtcatagttctggactttggcgggcagtataatcagcttattgccagacgggtgcgtgaatgcaacgtatactgcgagatattttcttataaaacagatatagaaaaaataaaagaaatccagccgaaaggtattatatttactggcggacccaacagcgtatatctggaggactcccctacctacacccaggagatcttccagctgggaatccctgttctgggcatctgctacggcgctcagctgatgatgcacctgctgggaggagaagtgggaaccgccccggtgagagaatatgggaaaattgaggttacggtagatccttcagcaaagcttttcagggaagtatccgaaaagacgatctgctggatgagccacaacgattatatcgcaaaggcagctcccggatttgacatcattgcccatacgtcagactgtccggtggcagccgtgcagaacacagaaaagaatctgtacgcggttcagttccaccccgaggtgctccacacccaggaaggcaaaaagatgctttctaattttgtttaccaggtatgtgaatgctccggcgactggagaatggattccttcgtggaagaaagcatccaggcaatccgccaaaaagtaggaaaaggcaaagtgctctgtgctctctccggaggcgtggactcctctgtggcagcagttatgctgtcaaaagcagtggggaatcagctcacctgtgtatttgtggaccacggactgctccgcaagaacgagggagacgaagtagaagctgtgttcggccctgagggagcgtataatctgaactttatccgcgtaaatgcccaggagcgcttttatgagagattaaaaggcgtggaagagccggagagtaaacggaagattattggggaagagttcatccgtgtgttcgaagaggaagcaaagaaaatcggtgccgtggacttcctggtccagggaaccatttatcccgatgttgtggagagcggcgtaggcggagagtctacggtgattaaatcccatcacaatgtgggaggacttcctgactatgtagatttcaaggagattatagagccccttcgggacctgtttaaagacgaagtgcgaaaagccggccttgagcttggaattccggaatatctggtattccgccagccgttccccggcccgggactggggatccgaatcattggagaagtaacagccgagaaagtaaaaatggttcaggacgcggatgccatctggcgggaagagattgcaaatgccgggctggacaagaagattggacaatattttgccgcgattacaaatatgcggtcggtaggggtcatgggggatgagagaacctacgactatgcagtggccctgcgggcagttacaacaacagactttatgacagcagagagcgcggagattccctgggaagtgattgggaaggcaaccagcaggattgtgaatgaagtgaagcatattaatagggtgctttatgactgtacggggaagccgccggcgacgattgagttcgaataataaaaattagatatggattatttaaatggcaggctgtctatatgatgatctgccatttttgtaataaaattgaagttcgttattagcgtagtgtgttatctcatcatttattaataggatagtgtatgatatacttacttgtatcaaagggataaaggcatgcgagcaatcatgaattcaatctatgaaataaatgtggtgttaaagctggtggtattttatgttataaacaatatgaaaatatggaaggaaaatcaatggagggtaaaaaaggatatttatatgatttagaaaaacttattactgtgcgtctgatgcaggaagatacggaaaccgtatattctcttttgaaaacggagagagatcccatatttgctatggggatattaccgtattacgcaatgtttgttcaatcttgtcaggagtatatgggagaaattttcttagaagaagtatatgcgaaaaagattaaaaacactcggaattttctcaaagcatatggagatggctttggaaaatcaaaaaagcgggttgagtcaatagatgaaaatcaaaatgaacagtatagagagcgattaaactttgactttatgaagaattggaatatccatatgaatctaggaacatactggacagaggataagcatatcattggaaatacgcaaatgattgcagattttttagaggttagagatgtgtttaatactgaaaataaagaaatatatcggaagttgggagagcaaatagggtctttcgttgtttctctaaaagaaggctttccgcaaagtatttgtctaccagagataaatcgtcctaatacaggcaaagaaattaaatatttttatgatttgaatacaaataatgtagataagctgtttcgtaataattcacaaaaatcgctaaatctattttttctgaacataacctgtaatcttaactttattaaatatgttttgaggccattattagacgttgataataagtggttatttcgagtagaatacattgtgacatattatgcatatcgctcaattcaacgtttaaaaaattactgtgagaataacacagatttatgtattggtttagaagaatttacagatatgttagaatcggggcgtggtttatttcaatcaaaatttcgcaattgtatgatgcactatgggattgaaaatcaaggagttatatctatagaatatatagaaaagccattctacggaatcgttgaaacttgctataatggaaaagattataattattttttggaagaactaagaaatatatcggagaaaattcttatggtattagaggacaggtttgatgcggaagggataacattagagcatttataaaaatggttgatatatgagataataaatagataatggaattagtaaaatcatggaagaagtcatatgtaacaagcttgcagtaaaggagtgataatttgtgacactactggtggcacaaataagttggacaaatcacctgcttattatgcccggatgtaaaactggagcagtggtatattagtcaaacagtggattcagagataaataagatgagtattacaagtagaaactgcaactgcaggaggccccctaggatgcttgaaaaagataaccaattcaacatatttccttcacacattggattaagaaaatatattcagtattataacatcgtgtttccggaaaaggatacgttcctgcctcaatacacgcttatgcctaatgcatgcggaacattgtcccttgcgttcgacggaaacggagtcaaagctgaactatggggcgcatccctgacacctattccgctgggcagagagccaaaccgctatcatatcctgctgcttattcagctttctccatatggattgtatcagatgatccgtcaaagccaagctgagtttgcggataaacgcctttcactggcagacattgactatgaactttacaaattactgcatcaggcatttgtggtgtcggaaaccacaggcggtctagtaaatgcttgtgagaaaatattataccagcgcatggaaaagcaggctgtttcggacgctttgctgtttgcagctgcatacatttctggtagacacggacagacacaagtgcaggaagtggcccggcagtccggttacagtgagcggcatttaaaccgtttatttctcacacaaataggaatgaatgtgaaaaactatgcacgcttaatccgctttaactatgtgctaaagcagattcaaacatcgccctgcttttttgctgctttgtcccagcaggccggttatttcgatcaggcccattttgataaagactttaaggccatcagtggtgttactcctcaacagtatttggaaactatgtcggatttttactatgacgggacggaaatctatcctataatttccttgtaggaggaataaaaacatgaaatatcaaggttgtcttttggcggtcagggatatctccgcctctaaaaacttttatgaaaacgtgcttcatcaaaatgcagtcatggatataggcgggcatgtagcttttgaaggcttttctctgcagcaggggtatgctgatattgttggcattgctgctgactgtgtaaaggaacagtcacataacttccaggtgtattttgaagtggaggatttagatcaggcatatgctgagctaaaacacttgcccagcctgcagtgggtacacgaaatcagggaatatccatggggacagcgcgacatccgggtgtatgacccggacaagcatattgtggagattgcagaggatatgactacggttatcaaacgcttttttgctcagggcatgtcgtcggaggaagttgccaaacgtacgatgtacccggtcgaattcgtaaagcagtatgcgttgtaatcagatgtatggaacaaggcggctttagcaagaaagccgccgctattttactcagaataagggaggccgcctatgaactgggagccgtggactggctgttacaaaataagtgacggctgtacaaactgttatttttatgggccgtatgcaaagcgctgtggacagaatacgattctaaaaacagataaattcgactggcccatcaggagaaataaaaaaggcgaatacaatattaaaggggataagattctggctacctgctttgccaccgactttttcttcccgaagcggatgaatggaggggagcggtctgggctatgatccgggaacggacggacattgattttttgattctgacaaagcggattgaccgttttcctgtatcccttcccgccgactggggcgaaggctatgacaacgtgaatattggctgcacggtagaaaatcaggcgctggccgattaccggcttcctctgtttttatcttatcccataaagcggaggttcatcgcctgcgctccgcttttggaggcaatcgacttgaccccttatcttcatggggtggatcatgttactgtggggggcgaaacggggcgggaagcgcgtgagtgtgattatgagtgggtgctgcagatccggaagcaatgtgtcaaggcgggcgtgaccttttggtttaaaaatacaggatcacttttccggcatgacggtattgtagaaaaaattaacccatataagcagaccggcatggcaaaaggacttggtatcgatatttcggacgggaaacggttgttttaatcataaaattaaagataattttgctccaatagatatgccttttttatgtattataaggacgagaactataatttgtgttaggagggcagatatatgtttaggataagacatatggaacagactgatttagaaatattcaaaaaatggctgtatacaccccacgttgccaagtggtatcatgagccactggattggatcaacgaggttgagaagcaggacagggagttttgctggatacaccactttattgtggagtatgaaggaaaacctatcggtttttgccagtattatgcatgcaaggacagcgatgaatcttgggaaggctacacagcgatgggcggttcctacagcattgactacatgattggggaatccgcttgcctccgaagaggctttggcaaaagaatcgtggcagacttaacagacaggatcgcccttcaccctgacgctgaaaggattgtggtacagccagagccggagaataaggcttcctgcggtctgctgctgtcctgcggctttatgctcgacaaggaaaaggagatttatgtgaaacccttgcgttgattaacaggcaaggccagggcgggcagatacgttcggcaaactggaatttgcagctgatattattacattatcggaggaattaatatatgcaaaactttttcaatgcgttgacaagtgaaggtaaaaacgtggagctgcccgaagaatttaactatttcgggaagcttatcggcagttggaaaatcgattacattgataatagcaattctcattcgataaaaggtgagtggcatttttcatggattctagacggaatggcaattcaggatgttattctcctgcccgattatgaatacggaacgacgctccgcgtttataaccccgggacgtatgcttgggatattgcgtattgttatacagggaaaattatgcgctttgaagcgagaaaacaagacgatatcatagtccttacgaacattgagaatgaaagacgaaaatgggtgtttgtcaaaatcgaggataataattttcattggcaggatgtgatggtaaaggatgacggtgaatggcagattaattttgacatatatgcccagcgcatatgataagcattgtgtatgctgcgcaaatcgagcttcctgcttatggaaggatgaacggagactcacttcgctgatttctcatgagcggcatgctctaaaaatttcatatcataagcatagatgccgggcaagcctgctgcttgccaaggaagggccagtctgccttgtgcggattggcccgttttgcgtgcagagggagctagtattccagaagcagggaaaggagtgaaaaaagagaacccatgatatgtaaaatattgaaatcctcatatggaggaaaaagtaatataatggtagaataaaaaacatacgaaactaatgatgtgtctcaagcctttttccatccacagaaagatcgggtgatgcaatgaaatatctggaggccatagaggaagcggcctatttatcggtgcccagctccccccaataccgaaaaatcatgcgtgtatgctatcaggaatatgaaaaaatgcattttcagctctataaagaagagatttacgagcagctccgggaggaaccggagtttgtttcttatacaattgagcagttaaagattgatttggaggcgcttgtaaaatggaagaacctcactcctattcaggatcctggaagggtgtatacgattgcggattacaaaaacaaacagtaccgctatactatgtcggaatatgcggtggagatagaaaggatgacggtgcgcctggaaaatctgtttttggagtcagggaatttgtccacaaatctgtttgtgcgtctggagagagggcttgatgaggcggaggacatgaagcagtgcagcctgaaggaagtcaatgagtggtggaggaacattcaggaggattttaagaggctgaaccagaactatcaggattatctgagagacttctactctggccggaccgatcatcttctgaaatccgtggaatttattgtacataaggataagtttatcaagtatctgcatgaatttgtccaggaactgcagaatcatgggaaaaagatcagccggatcctggaaaagcatcaggaggtaatcgagggtgttctgcttgagaaggtggtacagagtgaactggagatccctcatgcacttctggaactgcacggggatgcaaaatctagtatccgggagaatgtccggggaaagtgggaatccctgaaaaactggtttttggatacgccggagcatggctgtgaatgcagcaaggttctgagaataacaaatgatattatccgcagtattatacagaatgcggccctgattgtccaggtgcagaactgggggatcagccgtaaggacgattacaaaaaatttcttaagctatttgcagactgtggaaatatggaagatgcacacaagctctccgcacatatttttggggtgcagaatattcagcattttaaagcaaatgcggtcagagaaaccgatggcattaccggcagtgtctacggggaagcccccatggaatatttgctgaagcctcatacgcggaattacagagaaaaaagagaccgccaggggtttgccgataaatcttttgaaaagcttttgcgcagaaatgaatacctgcagcgtatagaaagggaaaaacgtctggtgctgcggtatatcaaggataaccggctggagttttcccggatagaagagaccgtgccggaaacggccagaattgtgtttctgcagtggattgcccaggcgaatatgaattctgagaaaaagggcaggacggagttcggccaggaatttcggctggtaaatacaggggaaacctgtgtactgaagtgcgaggacggagacttaagaatgccggcttatattttggagtttgacctatgagtgagattagagagttgctggaaaattactggatttgcaaggacacggacaaagaggcgtattataaggtaaagcacgggatatcacactttcagaagtttgtgagggaacagctgggatggcggctgatccacacagaccaccttttgaaactggaaaagatacctgcacatgcggaggcatttatgggaattcaggagttccaggaaatacgggattactgtattttatgtgtacttctgatatatctggaggacaaagaggaacaagagcagtttcttttgtcagagctgattgattttgtgggggtgcagctgaaagcatttatggagattgactggacatcattttcacagagaaagtccctggtgagggtgctgcagtttctggagcggctttctatgcttcgtgtatacgagggcagcagtgagtcattcggccaggaggcaggacaggaagtgctgtatgagaataccggatactccaaatattttgcggccagcttcagcggtgatatctccgcctttcaatcctgggaggactttgaaaaaaaccagatggaagagcttacagaggacagagggcacatcaggataaaccgtgtataccggcagctggcgaccagtccggctttgtactgggagaacaacgaggacccggattccctgtatctgaagaaccagcgcgcctgggtttccagatatatgggagagtatctggggggaaggctggatatacataaaaacgccgcattctggatgctggaggaggatgactgttacggaaggtcacatccccgggatgctatgcttccggagctggtgacacttgtctgtgctaatatccgcgtggaattggaagcgggcaggcttacaaaggcagagaatgaacggatttatatggaacccgcggcctttgccgggctggtatgggagtgccgggaaaaatggaaaggggcctggagtaaggaatacagggaaatggaaaaagagaagctgataaaaaatgtacaggagtatatgaaatcctggatgatgctgcgggcagaggaggagaaactctgcattctgcctgcagcaggaaaagtatcgggattttacccggcagattataagggtggggaggaagataaatgagcggccgttggaaaatgaatcgcattgggtttgtaaatttttggctgtacgatgaagagattatagaccttacggacgggaagctgcttctccggggccagaacggctccggaaagtctattacaacccagagctttatcccttttattctggatggagatcggacacccagccgtctggatccctttggttccagtgatcggaggatggaatattattttctgggagaggaaggcaaagaagaggccaccggttatctgttcctggaattcataaaggaggataccggggaataccgtaccatcgggatcggccagcgggcccgccgggggaaggcaatggatttctggggctttgtgctcctggacgggcgcaggattgggtatgatctttggctttacaaggaaacaggaagcaccaggctgccgtacagcaaacaggagctgagaaaaatcgtgggagaggataccccttttactgatgtgcctggggaatataaggcaatggtgaataaatatatctttggatttcgcaggccggagcagtatgagcagtttatccggctgctggtaaaggtccgtgcgcccaagctgtccaaggaatttaagcccactaaagtgtatgaaatcctcaacgaatccctgcagacactgacagacgaggatctccgtgccatggtagacgctatggaaaaaatggacggcattcaggagagcctggatcagctgagccgcgcctttggtgatgttaaaattatccgtaacgaatacatccgatacaatcagttcatgctggcccggaaagcccaggcttatcttgcacggaaacaggaagtggatgccggcagacagagattggaggcaagggaaaaagagtgcagggacatgaaggaagagatcgcggggaaaaagaaagcggcagaggaagatcaggccaggctgtcacttgcggactctgaattggtcagtctgtatgatacggatatggaggaggcagaccggaagcttgataaagccagggcagataaagcagacgcggaggaacagaggggacgctgggaagaaaaaattaccctctgccatgaaagaatccgggagagcgaagacaatcagaaaagactccggacagacattgagatggatcaggatcagctgagggaagccaggcaggaactggatgacatccaggaaaccctgggttgggacaaacacagggaggcagtgaggatactggaatcgtgcggggaagaagcgctggacacggtttcctccggtctgaggcagtatgagagagccattacagaggggaagcagcttattgacagacttcagcagctgcaggaggagtacgaccagtctgcagagtttctggacaccgtgcgtcagcaaaaggaggcaaaggaaaaggaagaggaggagcttcaggaagagattctgaattgccaggacgagctgatcacagcgttttacgggatgagggaaaaccaggagtggaaacccgcggcggaaaccttgcgccaggcagaacagaggatacgggagtatgaaagaagcagcgatgaaaatgaaatccaaaggatcgtccggggtgactgggaaaaatgcagggaaaccctgctggacagacagaaggaaaaaataggggagcagaaccggctggaggaagagattgctgctgtgagggcagaaatagaactgctgcgtcagaaagaggagattgagccgcagcgggaggaagctgcagcgcggttccgccgggaactgtcggaggcgcagattgcacacgttccgttcttcaaggcggtggagtttgcagatggtttgtctgagggagagtgcgcgcggctggaggcgcagcttttgcaggctggcattctggatgcattggtggtggaggaatcggattttgttaagataaaagaatccttcccccagatgctggacggtatgattcatgtccgccgccggggcaattccggcttttgcaaactgaaagtcagcgaagatctgcccggaaggctgcagaaagaggttttgcgtattctcagcaatatatacgagagcgacggagagggaaccctgtatctgggaggcgatgggtatttccgtcagggtgtcttgttcggcagggcagacaaaccaggggaagcggaatttgtgggatgtttagccagaatgcgcaagaaggagcagatgctccgctccctggggagccggctggaacagctggaggaaagtcttggaatcgttggaaatgaaattgagacattaaggcagcgggtgaggagactggaggaggagtatagggcactgcctggctttgggggactcaaccggaggctggaggcgctaaaagactgtcagatggcgctggaacatctggaaaagcagtattttgaccaggagaaaaggactgatctgtgtgccaaacggaaaaatgagggctgccagaagatgctgcagcactgtaagggtcttccctttggcaggacttcggcagagtaccgggagggcctagaggcggcggaggaatatcagcgtgtatggcagcaggtccccggggttgttcagaggatgcaaagaaagagggatgaacttctcagggagaaggatgctgcggaagaaaatgaggccagggcagacgaagccttcacggaaaaacgcagatatacggggcgtatccaggagctggaaattgagatcaggaaatatgatgagtacctgaaccgtcccgaaaatattgagaaggccggcagaagacagtctctgaaagaggagatccggaaacttgaggaacgcatacgtgtgcttgataaatctatcgccgtcctgcagaccaagagggataacatcctgtcgcaggaggcagaggagaaagaagcgcttcgggaaaaaattgtagaggaaaccggccttctaaattactttgaggaagagctggccctgaagctggtgctggagcccggggggaggagcctggaaacctgcgcccgggaagcggtgggcatgctgcgggaaagcgacagaggaagggagccggaggatttgctgaactcactttaccgggtgtatcagcagcataacagcaatctttccagctacgggacctctatagaggattgtttcggagagacagaggagggccttcgggcaaccaggaaacgggtaaggctggtttctgtgtggaacggaaagaagctttatctggaggaattctatcacaccctgaaatccgcgattgaggagacagaactgctcatccaggaaaaggacagagagctgttcgaggacattctctcccagaccatcagccagcagctgacagaccggatcgcagagagccggaaatgggtgcaggatatgtccgggcttatgaaagatatggatacctccatgggactcagtttttccctggactggcgccctaagtctgcggagaatgaagaggaactggataccctggaactggaacatatattgctccgtgaccggaagcttctcacgccggaggacatcgaaagggttgcctctcatttcaggagtaagattaaaacagaaaagcgcaggctggaggaggaaggcggggtggtcaattatatggatctggtacgcgacgcgctggattaccgcaaatggttcacctttcaaatgtccttttacaggaatcaggaaggaaagaagccgctgaccaacgctgcattcaaccgcttcagcggcggggaaaaggcaatggctatgtacgtacctctgtttgcggcggtgaacgcacagtatcaaaaagcagagaaccgggaccatccgcggatgattgccctggacgaggcatttgcaggcgtggatgacaaaaacatcagcagtatgtttgagctggtagaaaagctggagtttgattatattatgaattcccaggcactctggggatgctacgaaactgtaaaagggctgaaaattgccgagcttttgcggccgcagaactcgcaggtgataacagtcatttactatacctggaatggacacgaaaggatattagatgagcaatagtggggaatgcggtgcttacttcaggcagcagaaagagttaaaaaggctgtttgatgagatgcgcaaaaaatggcagtcctacgggagatgcgcggggactatatgtctgaaaaattgctccggggaggagagaaaggctctggaaagaatgctgggccaaaccttttgggaggcggatgtaaaaatcacactgaaccaggtggaaaaggccctgcaggacaccaggtttgctccaattaccctggaggagttactggaagcctacttccgggaaaaaatagtgaccaacagcaataaaaggcaggagaagatgcggcaaagagaggcttttttccatcaggtgcagcaatatttccgacagagaggagcccacggtgtctgtcaatggtatcagaggatgcaggaggagcggaggtatgggtatgcggtgctgaaccgggagcaggaaaacagtgaaaaaaatgcctttcttctggcaaaatatgtgggagaggcccttgcctggacccaggataacacccggggggacattcctgtggcggtgttgtctgcaaagattaccgggaatccccactactttgacaggggaaccccggccggaacacttttgatccatagtctctgcttttctcaaagccgggaatatcccgcctcggcctatgagtggaaagaattgctgacagcggcagggattcttccggatgatgtagccagcatggtaatcacatacggcgtacatctgagaaagaacggaggtctgcatccggggccggaggtgttttatcatttacaggagccgttaactctgaccagtatgaacctgatggggtgtgaactggcattgggggaaaatggacgcgcctttattgtggaaaatgaaatggtctttcgctatctgtatgaaaaggtgaggaggcagaatattactctgctgtgtacgtccgggcagatgcgcaccgccgcactggagctgattcgtcttctggttcaggggaagactgagatctattacagcggggatatcgatcccgaaggcctgggcattgcagacagaatatggcaaagatacccggaaaatatccgtatctggagaatgtcgccggaagattacaaaagagggttatcagaggagatgctggagtcaagaagtatgtcacagctagataccattcagaatccgggtctggctcagacagctttgcgtttaaaagagataaaaaaggcagcttaccaggaaaatcttctgcgggaactgctgggagatttgtcagaagggcagggcagcctctgagggcgtaaaaggctgccggacaggaatgttacagaattatagataagggatggactacgattgcgagtacggttctttatcggttaaaagattggtgataacacttatgattcctgtcaaatattcatccgaaatatcctgctgtaaatgaaaatggggcagtaactggggcggcagtaccttattcacattttcctgaatctccaggaccagctcactggtaaaacggaagccgcaaaggatgatatagcggggatccgtaatggtaataatggtaatgatgacttttgaaatcagatccacaaatgtgctgtcgccggcacattgttcaatcaactcttttcttgaggacacgtaaggcaaaaagttgatctcgccggaaaagttagcgtttccgcggataagatgtccgttcaccataaaaccggctccatacgtgtaatgttcgggcacatttagcaaggcatagtctttcagaccaatatccgaatgtgcctgaaaataaccaaaggttttaaaatgcatctcattgtcaataaataccttcacatggtattttgtctgtaataaatcccttaagttcagatgctccagctcttccatatcacagtataaaacctctccgtggactaccatgcctggtatcccgattccgataaccttaattttaggcgtttcttcaaactgcttagcgattaaagagtccaaaaattcaaaggaaagctgatgcagaggctgcatgtaagactctctcgccagcacagtgccctggagattcaccgtagccaattcaatttgattaaattccccatttgccacaagggatatagccaaagccagagaagtattggcattgtaaatatatattttggatgggcggccgccctgggacggagccatatctccttgtgagagttcacccgattccactaactcccggatgatatttccgcaggttgaaatacttaagcctgtgagctgggctatttcgttgcgggttccctggccgatttcccggaacgcagaaatgaccagttctttattctgctgttttaacagcattgttgttctaataggtgtattcattttatcctccaataataagccatagaaaatacttatgacaagacttatcataaacgtaaaaacacaaattgtcaagacataacaaggccatgtcagatggttcatagttttgagtaaaatacaataatttagtgtgcgcacaggtatatggaaaaaaagagacgtcggaatacggattccggcgcttttttttgtcatgaaatccgtaataaatctcaattcattccaggggaatgcaagttacccccaggtaagggcgctgtctctgtactgtgttaaaaagttatcaaaaaatacagcatttaccaaaaataaaaactttaattaaagttaaaaaaacatattgacagaaaagggagaatgagataaaatctgttttataataaaacttacggcaagacataatttaatacataatgcaatataaaacattaatggtgccgaaagaaaatggacggaaaaatttaataagtctggagggtggcaggatgtcatatgtagttggaattgacacggggggaacgtacacagatgcggtgttattggacacagagatacagggggctgattgcattaagcgtaaggcgaaagcaattaccactcatgagaagctggagataggaatcagaaacagcattgtgagcctggggttgtcaaagtcagatatcagcaaaatcgaaaaagtggttctgtctacaaccttagctacgaacgcaacggttgaaggaaaaattgggcagatagggcttttgatgataggcggtgtaccggtagggaaactagctactaatgagtgtatcgctgtggaaggcaaggtcaatatcaaaggacggattataagggatatcgacaaggaggaggtcaaacgggcggtaaaggaactgatgccaaaggtgaaagcttttgcggtatccggccaggcgagtgtgaggaacccgattctggaacaaagagtaaaagcggtaatcaaaagcatctgtgatttgccggtggtgtgcggtcatgaacttgtctcagagcttggatatctggagaggacaaacacggcagttgtgaatgcgggacttctgccgattattgataattttgtgaaagcaattaaaaccattctggatgaacagaaaatcggtgcacctgtttttgtggtaaaaggcgacggtacgattgctaaaatcgatgccatccgcaacacccccattgataccgttttatccgggccggcagcaagcattatcggggcaataaatcttacgggagtaaagaatgcggttgtggttgatatgggcgggactaccacagacattgggattgtacgaaataaaagagtggagctttctaaagacggtgcggtagtgggggactggcagatccggatccgctctgcccagctatatacatacggcctcggcggagacagcgcggtaaagatagatgacgggaagattgagattggtccggaacggctgcttccctcctgccggggaggagaacataatgtaacccccacagacgtgcttcactatactggtgagtttgttgcgtgggaccgggtgaatgcagttgaggcgatccgggaacaggctgcacttgcggaaacttcgtctgatgaatatgtggaacaggtgagagacgctatcgcagataaaatctacaacaatttgaaaagattccgaaggattaaatgtcccatctgtgccattggtgcacctgcagaatcctggtatcgaatcgcccagaaacaatataattttaacctgatggttccaaagcactatgaagtggcgaatgcggtgggagctgcaacctccggtgtgagtgtagagatagaagcagtaatccgtctgggggaagacagcggaggatacttagtacatgcggtaaatgaacggtttgagtttgatgagctggaggatgccctgcaaaagggcgtggatgtcacaaaagagtatgcagttaggctgattcaggaacaaaatttagaaatctcttatatcaggtatgaatgtcggaatatgtatcttgacgacgaccggattatgtataaagagcttgatgtggacgaagatggaactgtcgtaagtgaggatgacagcgactacggtaagtatctggagacgcagatcaaagtgctggtcggaggaaaaatatttgctaatgcttaaagaaggctttctagcttttttaaaataaaaatttaaggaggaagaacatgaatttatcacacaaaaagttactggaaatgtatgaaaccatgcagaagattcgccagtttgagttccagacagcgaagagctttgcagaaggagatgtgcttgggtttgtacatctgtacatcggggaggaagcaattgcaaccggtgtatgtgcaaatctcgttgacggcgactacatcacaagtacccacagaggacatggccatattatcgcaaaaggcgctgatatgaataaaatgatggctgagctgtggggaaaagaaaccggatattgcaaaggaaagggcggttccatgcacattgcagacacggagctgggaatccttggagcaaacggtattgtagggggcggctttaccctggccaccggagcagcattctcatccatgatgctgaaaacagataaggtctgcatctgtttccatggagacgggtcaacagcagaaggctccttccatgaggccatgaatattgccaccctctggaatcttccggttgtgttcgtaaatgagaacaacctttacgcagtatcctgccggataacaaacggcatggcaaacgagaacaccgcagaccgtgcagccggatacgcaatgccaagcgaagtggtagacggcaacgatattttagctgtctgcgatgctgccaagagagcgatcgatcgtgcaagaaacggttatggaccaacctatattgagtgcaaaacgtaccgctggagaggccattttgagggtgaaccggagaactaccgcaatcctgaggaagtgaaactctggaaacagccggatcatgacccgattccaagatttgaagagtatttaaaggacaatggtgtggctactgatgaagatcttaaggctgttcaggaaaaggtaaagggcatggtaaaagaagcagtgaagtttgccgctgaaagttcattcccggcaaaagaatcagcacttgaagacgtgtacacagatattgtagaggaggcgagataatgagaaatatgtatttttcagaagcggtagctgacgcaatccgttttgagatggagaaggatcctacggttttctgtattggtgaggacgttggttttgtagacggttctatgggcgctaccagaggattatacaagcagtttggaaaagagagggttcgtgatacacccgtggctgagcagatgattgttggcctttccgcaggggctgcccttaccggaatgcgtccggtagctgagctgatgtacaacgattttatgggatgctgtatggatcagattatgaaccagactgcaaaattcagatatatgtacggcgggggaatgaatgttcctatgacgctgagacttaccagcggcggcggaatgcagtgtgccgcacagcattcccagtctctggaggcaatgctggtacatgttcccggactgaaggttgtatatccttcaactccccaggatgtgtacggcctgctgctgaccgccattgaagatgacaacccggtcatggtatttgagcatcagatgttataccagacaaagggtgatgtagtagacaaggatgtatactccccgattcctcttggaagtgcggacattaagaaacccggcagtgatgttaccttagttgccaccggactgtgtgtgctgaaagctctggaagcggcagaggaactggagaaagagggaatcagtgcagaggttattgacccgagaaccttatatccatttgataaagaacttgtttacaaatcaatcgccaagaccagaaagcttgtcatcgttaccgaagaggtgaaaagaggtgcatggtccggagaattggctgcaaatgtggcggaagatatgttcgagaccctggataagggaattgtacgcgtgggcgctctgaatattccttgtccttataccgtaagtctagaagattattacttcccgcagaagaatgatattgttaccgctgttaagaaagtaatggagtaagcaggaaaaaggccggcccccgccgggcgctctgctccatgccctgcgggcggccatagggctttttcaaaaaataaaataaaaaaggtcacgttttaaaagattattttaggaggataaaaatggtaaaggtatttaagcttccaagaatgggagcaacaatgaaagaaggaactgtagaaaagtatctcgtaaaagagggagacacagtttctgagggagacgctttatatgaggtttccacagataagattacaaatcaggcagaatctgatatggacggggttgtaagaaaacttctggtagaagaaggaaccaaaattgcatgccagacaccggtgcttattgtagctgaagatgagaatgaggatatttctgcgtatctgtaacatactcgggaatccttaatggagagagatctatggggaaactattaaataaagcgaacagagattatatagcaagcttaattcctgacaatattccggactggaagaaagtctggcaggaaggatatgagattggaaaaaatctaaagataaagacaattccttttgaaaagaaatatggtatgaagccagtggactaccgtatgaagctgaaggaaaaaggagaaatgtgctggaaaattaacacgggcctctcaagcgtggaagagcaggtcgcggcaatgaaagaggctgagaagtttaatgaagagaccggcctgaatatcagcatggcacatcagctcccccagaatattaccggagttcccaaagataagagagaggggctgcccatttctctgggatttatgctgaatgagccggaggattgggaagcaattactatggcctccagcgttgcccccgtatttggcgataatcacctgggctggccaaacgctgtggaaaccacaatcaattctatcgaggccggatctcagtggacaggactgttcagcacctatgtacaggttgccccgggctgtccggatgaagtctggaacatgaccgagaatgtgaaggcccttgggatcgtggcttccagatacgatgacaaaatcattgtaaacggacagtccgacgactcgtatggagcctacttcaatgaccttgccacctcacttgcgtgggccagaatggatcaatacattgtatgtgatctctgcggcgccagatactcctacagcttcggaaactttactcaggacattatgcacaagacggctctgtggcttgccgcaagtgaagtcttcagcaaagaggatcagccgggaatcggttttgtttatccggataccatcagtcactgggatcatcatatacaggctaattacggtttccagattccggaagtgctgcttctgattcttgcagaaaagcattttaagacaggatgtgcattcctttcagttcctattacagaaaaggtagcgattcctacggttccggagatgctggatatgacaggggcttgtcagagagcacaggaagttgcctattactgggagcctctgatgaactgggatcccattgaaagactgagggatcagaccattgagctgtcagacaggatgttccattacatgctggacggtcttgcggaagctggtgttgatattacaaatcccattgaacttatggttgtcttaaaggccatcgatccgtttacgctggagaaattgttccatccttccattgttgaggacggcaacgagaccatcgtaccgttaatgcccgcagctttgtggaatgcaacccagaatgaactggccaatcagattactcttctgaaagataccaaatatcctgggcttctcaaggatcacagaatctgcgttgcctccgcggatgttcattttgcaggcgccgcagtaattgcaggagttatgaaggaatttggcgcggatgtgattgacggcggaaaccagctggaagcaatcgatgtgctggatctggcagatgagaataacattacagatatctgtgtcagcctccacaacggacaggcattgccctacgcaaaactgattgtaaaactggcggccgagaggggacgcaaatacagattcttcttcggcggtgtgctccagagctttttaaatgaagatgatgatgtaccttctgacgttacaaaagagattcaggaacttggaatcacaacagtgacaacagtagaagaccttctggacaaaattacacagcagtaagtagaaacgccctttggaactgtcgggataagggtattctgacagtagaaagggtatgatagaaaaggtgaggcagaatggaaaaaaagataaaagtgtcaggcatgagaaaaatcatcgcggagagaatgagcgaaagctggagcgtatctccccgtgttgcctttactctgagcgtagatatgactcatacgctggctttgctgaaaaagttaaataaggataatgaggataaaagccggaaagtcaccctgaatcatatattgatgaaggtctgtgcaaaggccattaccgaatacgaattgtttaattccagttttcaggataatgaaatcatcatacatgaccaggtgaatattggtctggcagtggctctggaagagggattgatggtaccgaacattaaggatgtagcgaataaggatatttatacaattgcgaaggaaaccaacgattctgttttcagaaccaagaagaatcaaatcaccatggatgacatcacaggaggcacctttaccattacaaacctggggatgatgggaattgagagcttttcccccattattaaccagccggaggctgcaattctgggcgttacaaagatgaaagacacccctgtggtaattgacggcgagattaccgtgaggcctatgatgaacctgaatcttgtggctgatcaccggatgattgacggggcttacgcggcaaaattcttcagttatgtaaaagaattaatggagacaatggaaatctaggatgtattaccagtcagcaaaataccggaaagcagtgagaaaagatgaaatatttagagacggcaaaagtggatccttattacaaccttgcatttgaagaatatgttttaaaaaattgcagggacgacgattatttaatcctttggcagaatgagaataccattgtcatgggtctgcaccagaatccgtatgaagaaatcaatctgtcaaaggcagaagaattaaaggtgaatattgtacgcagaatcacaggcggcgggacagtctaccatgacctgggcaacctgaattattcctacataacggattggaatgagggcagaggcgtggatttcggaaagctgcttgagcctgtcacagaggcctttcgggagtatggtctggagattgaactgaaggggcgcaatgatttgctgctggatggaaagaagatttcgggcagcgcacagacgttggcaaagaatcggctgctgcagcacggaacgcttttgatcgcttctgatctggaacttctgagcggagttctccatgtttcaccggataaatttcagtccaaaagtgtaaaatctgtgcgcagcagagttacaaacatacaggactatgtaccctttcccattgacattcagggagtaaaggacctactcatagattactggagcagaggtggagcgttcgaaaatgtgcagcttgatgctcgggcgcttggacagattgaaaagttggccgacgaaaaatacagaagtaaggaatggaatttcagccgatccccaaaatgtaattataaaaaccggaaacgatttttgggcggaacggtagaagtaaatctggacattgcagacggcagaattgcacattgtgtgatcaacggtgatttcctggcgctgcagagcgtaagcgcggtagaaaaaaaattgactggtatggcttatgaaaaagaaaaagttgtgaacgtattgcgggagataccgatacagatgtatttcggctctattacggcagaagaagtaacaagctgcttcttcgaggaaaaaagtgattttggaggtaaatgttaggcatgaagttattgattggtctggatctgggaacgacggctcttaaaattgcactatttgacaataaaggaggtcttttagctgtatccactcaggaatatagtctgatgactccaaaagtaaattttgtagaagaagacgcagaggtttattggaaggcattctgcgccggcctggctgatttaaaaacacaatatcccataactgcgcaggacagtgttgcgctggcaatatctgcgcagggggaaaccatgatctgtattgacaaaaatggccggccgttaaggaatgctattgtctggatggataaccgggcagttgatgaagcaaaagaaatgacagagcgtttcggggatgatacgtgctatcaggtaaccggacaggtgagctttgagccctgctggccggcggcaaagatcttatggattaagaaaaatgaaccggaaatattccggcagacgtataagtatttattgattgaagactattttatctatagaatgaccggattattcgccacagagggatccttagtctgctcctctgcttactgggacattaccacaaagaaatactggcctgaaatgctggagtttatcggaataaaagaagaacagctggcgcctgtacgtgagtcaggggaagccgtggggagaatgcttcctgacatacgggcagaactggggctgggagaggatattaccatatgcaccggtgcccttgaccaggcggcgggcgccatcggcgtgggcaatgttcacccgggtatgttctctgaaaatattggatctgcgctggcgatctgtgtaccggtggcagaacccacctttgaccccaacaggaagatgcctttgcactattttgccataccggatatgtatatgatgcatacctttaccaccggaggaatggcccttcgatggttccgagataagttctgccaggatgagatggcggttgcagccatatccacagaggatgcttacgatttaatgggaaaagaagcagacagcgttcctgccggagccgaaggactgctgatgcttcctcacctgtccggatccctggcgccggatgtaaatgccaaagccaagggagtgtggttcgggtttactatgaagcacacaaaagcacattttgtaagagctatttttgaggctgtgggctatattctgcagcgaaatattgataccctctccaagatgggaattgaagtaaacgaaatccgttccctggggggaggctctaagagcgctgtctggagccagattaaatctgatattacaggtaagcggttacttaccacaaaatcaaaagaagcggcatgtctgggtgcggcaattctggccgggaaagcagtgggcatatttgacagcatagatggtgcggtagacagcatgatcgatataaaaactgtctttgaccctgatccggaaaacaaagaggtttacggggagggatacgaaatgtaccgcagactgttttctgatttgactggatgctttgaccagaccatgtaactatatataaatagaagaaggagatcattaaaatggttgaaaaattaattgttatgctgacacatcatgatgttacagtgtcaaatgcaaaagaagtatttgagagctgcagggatctgcctgtggtaaactggggatttaaggacgttggcatgccgcctgcgcagatgagagagttatgtcagctgatgaagcaggccgggaaaactacatttttggaggttgttacatattcagaagaagaatgtatgcgcggtgcaaaactggccgtagagtgcggctttgattaccttgcgggtacaatcttctatgacagtgtactggagtatatcaaacagcaggatctgaaatactgtccgtttgtgggaaaagtctccggcagtcccagcgttctggagggaactgtttccttctgcctggagcaggaagcggaatacagaaacaagggggtttttggtgttgacctgttaggctatcgttactcacagggggatccggaggtattttctgcagactttatcaagaattccaagttaccggttatcatggcaggaagtattgattctccggaacggatcgagacggtacgtaagatgaatccgtggacatttacaatgggcagcgcactgtttgataaaaagtttgctgcagatggtacattccgggaaaatcttgagaaagttgtttcacttttgtaaaagcggcagcggcaataaggcagccagggagaaggttacttattagataaaatgatcttgaacggaatggagggtgtaaaaaatgaatgaaaaattagtcaacccgagtaaaaagcaatggtttatgttagttttatgtgtgatcgcaggctctatcgcaccatttttccagtattgtcacggaacactttcggattacattatggaaacctacagtatttcttattcccagttaagtattattaataccgcctattcctttgcctgcggcattggtttgtttatcgtaggtgccatggtggaaaagagaggatgtaaattcttcaccatgcttggcattggcattatgattgtgggccatgcaatgttcttctttgctccatcttatgcagtacttattatctccagactggtgagcggttttggaaatgcctgtatctataatgcggcatatacgcttgcggttcactggtttaatggaacgaataaaatgggagttgccacaggagcaatgacagcagcagacggcattggtaccttctgtgcactgtatattttttcactgctgctggaacgtctgggtatctcaagcggaaatatttcggtaatcgttttcgtagtagttgtacttgtgattctgattctgattttaaaggatccaggaattatggatatagatgaagcctcttccgcggcagatgaatccaataaatacgataaggcaatgaacaaaaacaccattgcacattgtattgccgttacaggtgtactggggggattgggaattgccaattattggggacccagtatgttagtggatctgggtatgtcaagttccaatgcaggattagcctctaccttatttactgcagtaggtattgtttccagtctgctgttcggtgcaatttctgacaaaatgggcaagagaaggccaaccatgcttatcggcggcgtgggaatggtagcgggatatctgcttatgatcttcggcaaccagggcggaatcgtttctattgttgtggttggtatgatctgtacaggattctgcgcttacgttgtatatcctatagggtttgcacttctttctgataccacgcagtcatccaagatcggaccagccaatggcattatccagggtgtatcattcctggtaggtatgtttgtcttccagcagattgtgggcgttgtgaaggactttacagattcttactggattggtctggcgttctgtgccgtactgaccttattcacaaatgttattctggttagaatttttatccgggaaaaggacgaggttgcaaaagagttagcaaaataagaagggattggagagagctatgcaaattattagaaaggctgcagctaaggtcagcctggatggaccggaagtagtgagagattactgcagaacggataaaatctggtttgggacatctgaactgctgcccggacagacaggcggagtggatccggggcatccaatctcccatgaaacttttttcgtcagcagagggcacgtaattgtgcggaacccggagacaggatgctgctatgaattattggaaggggatttgcttcttattgaagaaggggaacctcatgaaatcacaaatatagggaccgaggctgcactgatttcctggtgcggcggtccggtttaaactttttataaatgattggagatgatcaaatgaacaaagcaaaaatgggtttagtaggactttgcagtcccgtagaaagcggcggacagagatacgatgagttgatcaacaatgcggccaaggcaatgacagatgcagggatcgatgtggttgtggcgaaccgttccgtatggaactccacggatgcactgaatgtctgcgaccagtttaaggcagaagggatcgaatctgtggccattatggatgtaacctgggttacggattctcttaaatatctgtttattcacgagttaaaggttccggtggtgttctgggctgtgccttatccggaaacattctctattggctgtgtgcagaactttggatccgccttaaagaaccccggaatacatttcgagtatgtatatggtcttgcagacgatgaagccctcatcaaaaagattaaaaatgtggcacgcgccggacagattattgataaagtaaaatctatgcgtctggctctggtaggtccccgccagacatggagagttgcaggtcctcaggatatgagtattgaggagtgggagttttccacgactttgggccctacaattattcactttgaaatggaagaaattacagatgccgctgagaagatctgcgatgcagaggcgaaaaagaccctggaagaattaaaggatcgcacagggacggttaagtgcagcgatgcgtgtatgctttggatggcaaaagtgtatatggccacaaaagccatgataaaggataccggacttaacgccattgcagcggaatgctatccaaactatggggggctgatgaaccagacagcttcctggctggctgatgaggatattattgtagatacagaaggggatattgcccatgctgtgatccagtatattttaaatcttgcttccgacggcggcacatgcgcacttggtgagattggagcctttgacgatgaagctgattatatgacgatctgtcacgagggcagttccgcggcctctctggctgacagcattgataaagttgtcacgaatccgtccggagagatgggagcctttatcggagttccgttaaaagcaatggataaggttactttctgtgacatgcagggaagtgccggaaattaccaggttctgatcgcagagggcgagaccctgcctgtgagccacgaagagtgggtagacggcggcgagaagctggttcttaagctgagagctgacggacagaagccgagccgggtaattgatcagatgattaaagcaggactgcaccatcatgtagtcatcaaagagggcaattatacagacattgtaaagcttgtatgtgattatatgggcattcagaaggtgattcttaaataattacctttctatagaaatgctttgtgccctgagggatacagaggaatggagatatgtaagatgaaagcagatattattgtattaggcggcggtcccggcggttatctggcggcggagcgcgccgctgcggcaggaaaatcggttgtattgattgaaaagcgggcgctgggaggtacctgtctgaatgagggatgcatcccttcaaaagccatgctgaattctgccaagctttatcagcatgcgcaaaacagcaaaggattcggcgttacggcagataacgtagagattcatcaggaacaggtaattcagcgcaagaatcaggtggttggctcactggtagcaggtgtgaaggcaattatggacgccaatcaagtaaccgtcgtatctgccatgggctatgtggagggcagaacttcagacggattcatggtccgggcagatgacaagacgtatattggagagaaattaatactcgcttgcggctcggtgccggtgattcccggcataccaggactgaaggaaggaatcgcttcaggttacgtgatgacgaatgccgaggcgctcagcagaaccaatctccccgaaaagctggtggtgatagggggcggcgtcattggcctggaaatggcatcttattatgctatggttggcgttgaggtgaccatcattgagatgctggataaaattgcaggccctacagaagctgagatttcagagattttgctgagggcatataagaggaagggcatcaaatttaagctgggctgtaaggtaaccggggttaccggacaaggtgttttgtacgaacaaaagggcagtgaaaaaattgctgaagcagatgctgttctctgtgcaatcggccggcgggcctatacagaaaatatgggattagaaaacctggggcttgaaatgaaccgcagtgcggtggtaaccgacgaacatctcagaactaacgtggaaggcgtgtatgcggtaggcgatgtaaatggaaaaataatgcttgcccatacagcgtacagagaggcagaggtggcggtaaaccatattcttggaattgaagatactatggattattccaggattccatccgtaatctatacggatccggaagtggcaggggttggagaaactgaggaaagtgcagctgccaaaggaatgaaggtaagaagtatcagcgtttctatgaattactccgggagatatcttgcagaggtagaaagaggcgacggtatctgtaagctaatcgtgaatctggaggacaatacagtggttggtgtccatatgatcggcagctacgcctctgaaatcatctgcggtgcagagatgatgattgcatcgaaaaagccgctcgctgaattacaaaaactggtatttccccatcccactgtgggtgaggtaatcagagaagcattatttatgtagttttattgattcatcattagagtaatcctccgccccctgtaatgaaatggcagttcaatctataaattacagggggcatttaattagaaaatcaggtgccggggtctatgactgctatcatagcgtaaggcataaatatatagaaagcgataggtatttttatggatactttcagtgagaatgcgaaagcaaaaaaaatctatgaagacagaaaagtcaggttagcaatgctgggactgggtctggcctggatctctgccctgtcattggttattttccaaaacttcaatgtgacagcttcggatcggatcagtcagtcctttccaaatgtaattgtcttcacttatgtattaactcttgtgatactatctttctgcgagctttgcggagggatcctaatgatactttttaataccatacggggaatcccccttgcagaatatctgagaatctggagggtgaaatcttcaagaactgtattaggagcttctattcttgggggaccggtggcaaccgcctgctccatcgtggggatcagcttttgcgggtctacttatgggaattgcatcattgggttaacccctgtaataacggcaattttaggaacaatattcttgaaggaaaagacgggaatccgtgtttttgttggaattatccttacagttgccggtgtggttattgcaagtatcgcccctcccgaaggggtcagccatttctatctgggccttatcataacagcggcggcgccgatcggatatgccattgaagcaattatcagcacacatgccattgatgtgtcagatcctcttattgtatgccccctctaccgtatgatcggcggttctcttatagaattgctgtgcgcacttatcgtctgtgcggcaaccggtcatgtaaactggattacgcagatctatgcagtgattttttcagaaccgatcattttactgttcttgtttatgtctattatttttctgacaatccagtacaacggaatttatgtggcgtacagttactgcggagcgaccagggggtcagcaattttattttccactcccatatggagtattcccataggaattgtaatgtctaagatgggaattatttctttttcggtgacagctctggggattctgggagcctttgtcattgttgtaggaatattgattgtgctggcaaaaccatcggaattgtttaatctgagagatgtgtagataaggagattttatgagactgcccattaagtcaagagttttagaatatgctattttaaaaaatagtaccttttcttccgaggaagtggctaaaaagcttcaggaggaatataagggggagagaacaacctcggtaaaaaacatagaaaagattatcagtacctactgcggagtgggaattatgaaagctgcggccattgggatggccgcagatggcaaacttaacataacctatgaagtaactgattttgggaagtcgtgcagaaagatgatcccggcgtccgattgtgaagagaattgagaggtgtagtacgtggagaattcatacagattttttgccaataagagctgcaaatattatccgtgccacagcggaatcgaagaaatgaactgtctgttctgctattgtcccttttatatttccgagaagtgtcctggtaaaccgaaatatttgaaagcgaaaagcggggggaggatcaaggactgcacgaattgtacatttccccatcagcctcaaaattacgatagtatcatagactggctgtcaaagcagactataagataaaacaagaaagagtgtggataatatcgtaagaacagggaagcgcggaacagcataatacgaaaggataaatcaatatgagatatcgacaattgggtaatacaggcttgtgcgtgagtgaaatcggtttgggagcagagtggctggagcggcacaatgcagaggaagtggaggaagtcattgactgctgtgagtcgaatggaattaatattctggactgctggatgtcggaacctatggtgcgcaccaacatcggagcagcactgaaaggaagacgggaacggtggatcatacagggacatttgggctctacgtggcaggatggccagtatgtgcgcacccgtgatatggcaaaagtcaaagaagcctttcaggatcttctggatcgcctgcagacagattacatagatttgggaatgatacattttgtggatgaggctgcagaatttgaccggattatgacaggggagtttatagagtatgcccgtaagctgaaagaacgggggacgatccggcatatcggaatgagcactcataatccggatgtggcaaagatggcggcccggtgcagtgagatagagatgattttgttcagtatcaatcctgcctttgatctgatgcctgccacagaggatatgaatgagtattttgcagaggattacgatgagacactgaggggaatcgctccggagagagaggagctttaccggatctgtgaggagagaggagtaggtataacagtaatgaaaggttatgccggaggccgtttgttttccgctgagacatctcccttcggggttgcacttacgccagtgcagtgtctgcactatgcactcacaagacccgcggtggcaagtgttatggtggggtatgatacgccggagcatgtggctgaagcagttgcctatgaaactgcctctgaggaggagaaagattacgccagtgtgctggcaggggcaccccgccatgcctatttcggacagtgtacttattgcggccattgtgctccatgtccccagaaaatagatattgctatggtaaataagctctatgatctggctgtgatgcaggaagaagttccgagtacggtaaaagctcattatggggagctgtcctccaatgcggcagactgtattggatgcggactgtgtgaagagcgctgtccctttggggttcgcgtggcagagcgtatggataaagctaaattgctatttcggtaatgatatatcctatgaagcatagagaagcggaattgaaaaagttaataaacgcccaagagaccaaaacaaagggcgtaagaattgcagcatgccagataaataatgccggggtggtattatttatacataacatagtgatatatgcagatccattttgccatgataacttggatagatatcaatgtgcagatccgaaactggaggatactgctttcgcgggaaaggctgaattattacttctgactcacgagcacagtgatcactatcatatggaaaaagtcatagcgtttgcagagaaaaacaaggatctcatcctattcgccaatgaaaagattacaaaggaattaaggggccgtctgcataatacgattctgacggtaagccctggggactccgtttcatacaaagtaaattccgaactggaactatattctttctgctgcctccatatgggagaacagtaccgggatgtggacaatatttgttattatctaaaaaccaaatatggcgccttgctgcttaccggagatgccgagccccaggcgctgctggcacatgcagaacggagcaggctgcaggtggactatctaatctgcccctttacttacgtcacgctggcccgggcgagggaacggctgcaccctatcaaaacagtaatagcagtacattttccggatccgaataaagatgacggggggtggatcgcatgttttgaatcggtggtaagaaagaagcaggtagtccccaaagtactatatagcctgaagcttggggaatattttgaactatacccggaggcaagagactgaaaaagaaaagaggagtactttatgaatgattgggaaaaattacaaaatggtttattatataacgacgttgcccctgagctgtttgcgcgccgtgtaacagccaagcagctcttccgcagctataacgggacggatgacagccaggcagcataccgcagggagctgatggtcaagatgtttcatgaggttggcgatgaggtgctcattgaaccaatgtttcagtgcgagtttggtgtgaatatcaccatcggcagccatgtgtatataaattttggatgcaccatactggactgcgcagaagtaaccataggaaaccatgtgttaatcggccccaacgctggaatctatgcggtgaaccactgcctggatccggaggaacgggcagacggagggtgcttttctaagccgattcatatagaggattacgtatggctgggaggcaatgtgacggtactgcccggtgttaccataggggccggagcggttatcggagcgggaagtgttgttgtgaaagatatccctccaagggttgttgccgcgggaaatccctgccgggtgatacgggaacttacggatagggataaaactggttttgtaagagagtagatctgctatgtaaaaaggtcacctgtgattgctgcttactcacaggtgaccttatccttttattttatttcccattcctctgccaggaaacgggctacaccgtcatggtcacagtcggccagtacctgggtaaccatttcctttacctcatgcagagcattttccggggcatagcttctgtcagcaatttctatcattgagatatcgttcagattatcgccaaatacaaccagttcgctgcatccggtcatttccttcagctttaaaagcgcatttcgtttactggctttttggctgaaaacctcaaggcaatacagaccgttatagacattgagataaaaagagtacgcaatcccttctacacgctccaaatctctgcagacaggttccagcagcttcttttctccggtgtatgtaatatacacagcctttccgcttccggcagcccctttcaaattctctgtcagctccacttgtgcacacttttctatggcgcgatcactgtaatactgggtctgctcctccagctttttatggccgtaacagatggaaattccctgagggccataggtatagacaaaacaggacaggccatttttctgaaagatatctacaacggtttctgcactttgggctgggatctcttccgcagctatgatcttttcagtctgaaagtcatacaggaatacgccatttgtcagtatccctggggcattgatacggatatcccggagtctgtaatcgcatccatagggcatgcgggcagtggcaacggtgaaattcattccccgtttgacgcattggttaatcgtatcggcggtgtacttcgtcacctgcttctgccggttcagcagagtgccgtccaagtccgatacgtataatgttttactggtcataaagtaagctccttcttaaaataataatccgggcaggactgtgggccggaaatggcctgcagtcctgcaccggaagtatatcataccgtaccgtgataattcaatacactagttacattaactcattgacgatagcgaccacattcttagaactgttgccgctttctatccccttctggaacagatccagtatggcgtcaccgcagggagtttttactcccgccgaatgcatggaatctaagatggttttcatagctgtagtttcaattcgcagggtacattcagaagcgtcctcaaaactgccggtatagttgctgcattcatcggaaaatgcccggtaattacctgccagcataattggcagaatttctttggcctgctctataaaggattctaccgaatacttatacttaatgcagtaagcaacagactccgccaaagtagcaatagcaccgaaatggacatccagaaccgcgatatcaattacacttgcgcctataatatcgggtcccagatatactgcctttccgattgcttccagtacattcctggcagcgtcaaatacctgtctgcacccagaatagattagataagctttatccgagccaatgtcgcctggatagttttcgattttggcatcgagatgcatcatgcccatgtctttggcaagttgatccatggcagaaacttcttcaggactagaggtagtagtattaattaacatttttccattcaggcgatctttattggcattggataaaactccagaagcaatcttgtgatttggtaaattgactaagatacagtcgttatcgccggcctcgtccaaactggcatagtatttagctccccggctgataaatttttctgctgcatttttattgatatcaacaattgtaaccttaatattggcattcagcagcgcgttaatgatggaacctcccattactccacatccgacaacagtaatttcttgcataatcttctcctttatgttaaaatattatttatgataactcatatcgtaagtaatattataatataacagcaaccgcgatttgtcaagacaaaaatacggattttgttgtataatgtccctataggaactgtttaatgtctgcccttggggagacctgcatttaataaataaaagcataaggaggaataaaaatgggaagtaagaagttggttgcatatttttctgccagcggtgttacggctaagttggctaaggaactggcagaggcaacaggagctgatttgtatgagattcagccacaacagccttacacaagtgctgatttggactggacggacaaaaagagccgcagcagcatagagatgagtgatccggattcacgcccggctatttccggtaatgtggaaaacatggagctgtatgataccgtatttgtgggctttcctatctggtggtatgaggcccctggaattatacatacatttctggagagctatgatttctctggaaagacgctgattccttttgcaacctcgggaagcagcggaatgggagagactgacagcatattgaaaaagtactgttcgtcagagacaaagtggaagcctggcaagcgctttggcagtgctgacaagggggccctgaagtcttggattgacagccttggattataaccttaaagtgttcagtataaatatcccccgggaggcagacggaaaatgaagtgcggatgtctgcccccgggggattttattattcatttcgttttttggtcctataggtcttaggacttaccccatactgatctttgaattttttagaaaaataactggtgttattgaagccggtcataaagcagatatccgacatgcttttttctgtggttaacagaagctgggaggcctgcagcagacggaacttattaacatactctacaggtgtcatttttgacaattcagaaaagcacctgaagcattcacttttactgatattggcagcgccggcaacgtcctgtatggtgattggctgtatataattttgatgtatgtaatcaagcatatccttcatacgctgttctctgagcagcttgccgctgtcctcgggatctttgctgggtttgggaagaatgctcagcagattacgccatattccgataagattttccagtaaaaacagttcatacgtaaaatgcgtgctctcagtatagtacatcctcctcatatactccagaatcttgtggccctctttgcgttccggggttatcacaagagcttccggacggcgggtagtcagaggcagggtataattttcacaattggcgctcctcatgaggttaatcaaaatctgaggcagcaatacaatgtcatatccgatggtacccccggacaactctctggccagatgtatggcttcaggtgcaatgtatatagcacagccctcttccaccacgtagggtgtcccgtttacctgatactccgcactgcctttgagaacaatctgcagttcaagctcatggtgccagtggctgggaaagctcccgtctgcaaaggtatcgaaatggtctataaattctgagattgggaacatctgattggggtgcgccaattcctccatcatcttgtgatttataacaatactatccatagaacaatcctttcccttctgtttattccaaaacatccatagatacatcctttgacagggtaaaaaactgcataaaacaggtgcttgtatactttaatattttactatatccataaataaaaatctagaaatatcggattgctgaaggaactctttgtgtatattgctgttttacacactggtttcatcagtatataaaggcgatatcaataaaaatgcaacaatattcccaggaacctgagaagattgttttattattagaaacgaaactggctgaactgatttagaaaagatagtacaataccactataaataagttgtcgacaatttacaaggcagtaaataaaaaggaaatggatgcggaataaaacaaatttcggatcgaaaagaaaggagttaagaaaatggacgacgcttctaaaaaccgccggagcagggaggatcatgttgtcagcttccgcgaaaaaatttgttacggcctgggcgattcggcgtgcaacgtcgtatacggactatgcagtacgcttctcacattcttttacaccgactatgtggggattaatgcgtttgtagttggaatgatctttttgattacccgtctctttgacggtgtctcagatattattatgggatttattacggaccggacaaagtccaaatacggaaaggcgagaccttggattctgtggatgtctgtaccttatgcggttaccttcatcctgctcttcctggttccggcaaatgcgtcacaaacgatacaggcaatctatatttttgtaacctataacctggtgaacaccatcgtttataccgcattgaatctgccgtactccaccatggcatccctgataacacgggatcagaaatcacgggcctcaacccaggcatggaggattttctgcggaccaatggggaagatggtagtaacggtttccacacttcccctggtcaaggctctcggggacacacagagaagctggatcattgtttcctgtatttttgcggctatcgccctggttctgctgctggtctgcttttttaacattgaggaacgggtggtaatcgaagcagctcagaaccagaaggtatctgtgggaaaaaatctgaaggcgctgttttccaatcagtactgggcaatctgtctgggcctgtggggtattatggttatgatgagtacagtcagcggaaccataacgacctattactgtaaatacatacttgggaatcaggagctctacagcccgatctatgcggcggagctgattgcccagagcattgtggttttaatagtaccgtattttgtcatgcggttcggcaaacgcaatcttacccttgccggtatcctgctggtgattgtggcgcagctggtatggattaccaatcctatgagtgtaggcgtggccatgacaagcgctatacttcggggaattggcgtggcgcctctgtgggcctgcgtattccccatgattgcggactgtgcagagttcggccagtggaaaacacatgtcaggcaggacggcatgattttcagcgccgcgtctgtgggctcaaaggtgggcggtggtctggcatccgcaggaatcgggcttttgatggattccgtcggctacgatggtctcgctgccgtgcagagtgcggaggctatgggaatgatcaaagctatctgtatgtatgcgccaattattttctctgcaattattgttgtgctctgtctgctgtataagctggataagctgtatcctcaggtaatagcagatctgagaaaacgggacgagcagggcattttataactgcggatgtcctgctcccagaggcaattaagaatagaaaggaagcaattatgattgattttgcgattaatatcgaaccgctgtatccaggcatggatatctgcgggaaaattgaaagggtcagtgcggccggctttcaggctgtggagttctggagctgggatgacagggatatttcccgaataaaagaaacctgcagaaaacacggggtaaaggtaagggcgttcagcggcacaaagtcatattccctgtgtgacggagaacacagcaaagaatatatagagtggataaagcggtctatagaagctgccaagatactggactgtgataccctgattctgtttcccaatcatttcactccctgcggctgtgcggatttccgtgacaagtacagccgcggggcgatgattgccaacataacgcatacactcacatgcctggcgccccttctggaggaagaagatatgacagtgcttttggagcctctttgtaatctgggggccgatgcgggcatggctgtgacggatacggtgctgggagcggacattgtgagggctgttgactccccgaaggtaagacttctgtgtgatgtgtatcatatgcaggtaatgcatggaaatctgcttcagaatattacagacaacatggatgttgtgccttatctgcacctggcagatgcaccggaccgccacgagcccgggacgggggagattaattttaactttctgttaagaaagattaaggagagcggttatgacggaacggtctgctttgaatattttcccgcaggggagaccgaagcaggattttcttccataaaagaagcaggcaaattactgctttaacatacggcaaacgccgcgtgattgccgaggggcttacagttaaaataacatttcaggaggatgaaaaaaatggtgaaagaattaaagtatggtatggtaggcggagatttgaaagcactgattggcgagtgccaccgcaaggcgctgggtctggatcccagggcaaagcttgtatgcggatgcttttctgctattgatgagctgaatgatgagtgcgcagaagcctaccacgtagataaatcaagagtttactatgatgccgaaaaaatggcggaagcagaggccgggaagattgatttcgtctccatctgcacccctaattttgtacactattcagtggcaaaaacatttcttgagcatggcatcaacgtagtctgtgaaaagccgctgaccctgaaggttgaggaggcggaagaattgtccagactggcaaaagaaaaaaatctggtatttgcagtggattactgctattccggatatgttatgtgcaaggttatgaagcagatgattgccagaggcgatatcggcgagattatttctgtgaatgcagattatatggagggctgttttttggaacttctctctgagaaggaacaggttaactccagaatctggcgtacggatcccaaatacagcggtatctccaatacctgcgcggacgacgggacacatgtagagcatctggtgcactatgtaaccggactgaagattaagagacttttggcaactgcagatacgtttggcaagaagctggatctgaatgacaatattattctcgaatatgaaaacggtgcacatggcgcatattggttctcccaggttgcgtgcggatcccccaatgagattaatctgcgcatatacggaaccaagggatcccttgaatggcatcagaccagaccggatgaggtccgttttgcaaaggcgggtgaggcagcccagctgctctgcagggcaggggatggcatcgatgtgccggccggcagtctggcgcgggttcctttcgggcatccggaaggctattatattgcaattgccaatatttacaggaatgttattgatacaattctgaagctgaaaaacggtgagacacctaccgaggaggatctggatttccccgatgtggagactggcgtcagcggcgtaaaattctattacgcagttatggaaagtgcacagaacaattcaaaatgggttgatgtagagtaggagggaagcaaaatggctgacacacagaaagctattatttataaaggaccgggagagtttgcatatgaggagcgtccggtcccggaagtggaacagggggatgatgtcaaaattaaagtatatggctgtgccgtctgcggcacggatgtgaatatctttgctacgccccagaaacatccctgtaagaaggacataatcttcggtcatgagttttgcggtgaggttgctgcagtgggggcacaggttacgaagttgaagcctggggataaggttatcatagatccccacggtccctgcggccgctgtgacaattgcctggcaggacttcctgaggcctgcgatgaggtattccttggtccggactccggctttgacggtcaggcactgacgatgggggtatttgctgacggcggtctgacaaactatgtggttctgccccagaaatgtgtgtacaaggtaggtgcggatgcaaagcccgagttgatgggcatggcagaacctctggccgggtgcggatatgcactggaaaagctgaatgtgcatgtgggagataccgcatgtgtgctaggtgcggggcctatcggtctgatgttcacagcacttctcaaggcaagcgggtgcagaaagattattgtctcagaacccattgaataccgccggaagaaagcgctggaagtaggagcgacctgcgtggtgaacccggagcaggaagacgtgggcaagatagttttggcagagacggagaatcttggagtagatcactgcattgaagcagtggggggattgataccggactgtattgaatacgtacgtccccggggcaaggttctgcagtacgggcatgacgaactggtacggcctgagattccggtgggtacgcttcttaagaaggaagtagagattcacggcgggttccttgggaaatattacatgagaaaggtaggccagatcattgaagacggtgtacttcccctggagaagatcctgacccatgtaattcctgcatccagatataaagaggcaattgagctggcatccagctatcagtgcggaaaaatatttgtttccatagatttttaggaaaggagcgtttgagagaatggctgataagaaagaaattttacgtttacaggagctggcccaccaggcccggtacgatctctgcaatctgtgcggatcttacggcggaaatattcatatgggcggagacatgtcaatgattgatgtactgacctgtcttttccagcataccatgcgggtggctcccgaactgcaggaagatcccgagcgcgaccgttttatcctcagcaaaggccacggcgcggcatgcatgtacattgttatggcattgaaaggatttttcgactataaagaaatctgtgagacctatggccagataggcagtaaatatggccagcatccgtgtaaaaccagactgcctatgctggaggcatccacaggttccctggggcatgggctgcccatcagtgtagggctggcggcatccgcaaggcagcggggacagaaacaccgtgtcttctgcatgatgggggacggggagacttgtgagggttctgtctgggaggcggctatggcaggcagagcacaaaagcttggaaacctggtggcggttgtggatcgcaacaggcagctgatgaccagtttttccgaggagtcggtcataatggaaccatatgcggataagtggcgtgcatttggatggaatgtaatagaaataagtgacgggaacgatatgaggcaggttgcggaggcattcgacggacttcctgacagcagcggggagaccccaactgtaataatagcgaatactgtaaaaggaaagtatgtatccttcatggagcgccagataaaatggcatgcgggaagcctgaatgaaacggatttaaaaacagctttaaaagaccttgacacggctttggaaaagcagagaaaggagttataaatgaagcaatcatatacacttgacgaatataattcagcaagatctgtggttggagataccatagcggagcttggaggaaaagataatcgggtatggctgctgactccggatatcggtttcggctgcaaagatttcaaggaaaagtatccggaccgcttccttgacacggggattgcggaacagaatgtggttggcatctcatctgggctggcttacgatgggaacataccgtttattatcgggatgatgccctttatgagtatgcgtgcattggaacaggtgcgcacagatatctgctatcccaaccttccggtgagaattattgcaaattatgcggggctgacgggaaatggcggatctactcattatgctatggaggatatggcgctttattcttctctggtcaatatgacagtctgcgccgcatccgatccggtgcagctgcgtcagattatagagaaaagtatgacctatgacggtcctctctccatccgtattgacccgggtaaagagaaccgtatcttatatccgtcagatgcggactttgaaattggaaaaggctttacggccagagaaggcagggacattgcggtaattgcctgcggggaaatggttgattacgcacttcagctgcaccatgcggcagaaaaagaggggatcagcgtgcgggtgattgatatgtttacagtaaagcctctggatgaagagattgtacgaaaagctgcctctgagaccggcaggattattgtctgggaggatcaccttatgaagaatgggctggccagtgcggttgcggatgtactgtgcgaccagggaatcagcgtaaaatcctttaaaagatttggggttccccaggtatacccgggatttggaagcccagaagaattatatcatcagtatcaatacgatcttgaggcagtcttgtcctatgtgaaaagtctgttctaaggaaaaggagtaatagtatgagtgcttacatgtggaatacattttgtccgacactctttggaacgggtgcgtccaaagaggccggaaataaagccaaagaacttggaatgcacagagtgatggtttgtacggaacaagcgttatgtgaattcaaagtagccacccaagtgattgaggtattaaaagagacggggctggaggtttttatatttgataaatgcagggcggatgcacccagcgatatctgcgatgaaggtgctgcgtttgtaagagagcatgaaattgacggcattgtggcagtggggggaggcagtaccctggataccgccaaggccatcgggattatcatcagccagaatggttcgaccatccgtgactactatgggatcggggaagcagaacatgagataaagctgatcacgctcagcactacctccggcacaggcagtgagatttcccagtgggcggtcatcggagatacggtaaccggggctaaggaaatgcccatatacaagccagacatggctatcgtggatccggttctcacctattccctccctgcaggccccacggctgcaacggggatggatgtgcttgcccactgtgtggaggcaatcaccaacagaaattataatccttacggctatatattgggtaaagagggaataaagcttacccttaaatggctgcctgctgcggtaagggagcctaaaaatgcagaggccagggagatgatgtctttggcggccaatctcggggggatggctatctcggcctgcgggtgccaaatcgggcacagcttcagtcagaccttcggcgcccaaaaccatataccccacggtctgggctgcgcctggggactgcccggggttatgatttatacagcaaaatacggtgaaagaaagaacctcgaggctgtggcggatgggatggagattgcatatacacaggatatagatacgatgcagttggctgaggtcctggcggacagagttgttaaactgatgaaagaactaaagattccatccattcgggactctggatatacgctggaagactgcctgcttgcagcggacagatttgcccatgacggtgccttcgggaattccccgggcaatccgggtagaaaagagatcgaagcgtttattaaatatacctatgatgggtactaatgccgtaaaagtcctctgtcactcataaaattataaaaaaactcttcccacattttttatatattgctataattaatctgtcagatacaggtgtgtcaagtcagaggaggattaagcatgattgggtacaaagagttgatactggaaaccggtatttgttttgacgttttcgaccagatgcaggatgaaatattgttttttgatgtgaatgcaaatttagtatatttgaatcaatctgcagagcattcagagggatatactttaaaggaatcgtacgggaaatctctttttgagctttatgacttccagaatgatgtcagaaaggacacaagcccggcttatattgctttgacggaaaaacgtccggtccgcgatatgatatgtgtttattataccggagggctgaaaaagacaaaaaccattgactctacgccaatctataagggcagagaacttataggggcttttaatattcagcgtgacttaacccagctttccaatatgattgacgagaacctggagttgcagagtaaaattaaccggcacaggtcatgccagactggaagagatgctgctccttttgcagagcttataggcagcagcgagaccttccggtacagcttaacgctggctagaaaggctgccaaaacggactcctctgtactgctgattggggaggatggctgcggaaaaaatacgtttgcccggtctattcatgaaagcagttcccggtctgacgggcctttcctttctatcaattgtgcatctattcctgagaacctgctggatggcttgctgttcggcacacagaataagcattatcccggtccggattcggaaggcattctacgtcaggccagcggcggaactctttatctggaaaatgtaacgtacctgcctcctgcgatacaaatgaagctgctgcatgttcttgaggaacatatgtttataaggccgaacgggagtgaggctattccagtcaatatacgtatcatctgcagcagcagtgaaccgcctgcggaaatgatacgcaacaaccgtctgcgcatggagttcttttactgcatttctgttgtgcagattcccattccttctctggcagaacgtacagaagatattccattgctgacaaattactttatcagggagtttaatcgccggtttcataaaagaattcagggcgtggacagtgaggtgatgtcatggttcagaatctatcactggccgggaaatgtccgccagtttcgctcctgtatagaagcagctatgaattttacagaagatggtcatgagatccatgcagacgatctgcctgccaatgttttttatgagacccggacgtccagaacacattttaattccggcaatgaaccgcctgagatacagacaggaggatttgcggatagcagtgccgtgaagcaggacatgtatttcagcaaaagaaagctgtatctggaagcccaggaaaaagagcaggaggagattatcaaagccttaaaacaaaccaatgggaatatttcacaggctgcccgtatcttggggatcagcaggcagctgatgcattatagaatgaaaaaatatcatatagaatgaatcaaacattcaggccttctttcagagggcttttttgttttctatgtctgtagaggctgtacatgccggagtgtgttagacagccgtaacattcgcaggaacactttgttctcaaggcacagattttggttagaacatgtaaaaaagtgtaagggagaaaaaaagagaaaaaactgtaaaaaaataattttacaatgaattttcagatatttacgttgactgtgcctgatatatcgtgcaataatacatataacaaatgaaatttatttatacaaggaagtataggagggtgtatgattatgcagagatatcaagcagttaatcaaacagatctaaacaaaattcatgaaacgtctctaaaaattttggaagaagtgggcgtcattatgacatacgaaccagcatgtaatcttcttgcaaagcacggtgcaaaaattgacggaaaaaaggtattatttcccaggaggctggtggaagagagtttgaaactagctccttcctccttcactctgtacgcaaggaatcctgaaggaaatgttatattcaatctggaggatacacactactgcggcccgggcggttcctgctttgttgcggatctggatcatggccgccgcccaagtaaaaaagaagattttattaacctgataaaactgtatcaatccatggatcttattgaaatgcatcatgttccctgtgagatgacagatgtggatccggcaatcagaaacaaagcggttgtctacgagaccatgaagtacagcgacaaaccgctgatgccttttatgtttacctatgaagaagcaaaggaatgcatagagatggcagcggtgccctttggcggcctggaggccgttaaaaataaaaaaccggttctgctcgcggatccctgtacagtaacccctctatgctatgacgacaaatcgctggctactcttatggcctttgcagagtatggtcagattcagcttatcaattcgctggcaatggccggggcgacggcacctgtaacacttgccggaaacgttgcagtacagaatgcagagatactggccggtattgtcttagctcagtgtgtcaatcccggaacacctgtcatttattcggcatcaggatctaacgcaaatatgcgtacctgctccttaaccataggttctccggaatgcgcgttaatgtctctgattaacggacagctggctaagttctatcatctgccatgcagaatcagcggcgcaattactgacagcaaatgctttgatcctcagatgggctatgaatccatgatgaatcttatgactgccgaaatggcagggggaaactttatcctgcacgggggcggcattatggccacgtatgatacggtttcctttgaaaaatcaatggttgattatgagctcatggggcttgtaagacgcatacaccggggaatagaagtaaatgaggagacactggcctatgatgttatcaaagaggtaggtccccggggccagttcctgacagaggaacacacctatgaacattttcgtgacgcacactattcaccatttattagtgactctttgaatgtggcccagtgggaagccggcgggaagaagacagttgcggatcgggcaaatgagaagtggaaaaaaatgttggaagagtatgtgcagcctgatttcccttctgagcttgacgcagagttaagaaaacatctcgaaccgtaaatcatgctgaatggagaggactgcttatgaaatcattaggaaaagagaaactaattgtttttattatactcagtgcaacggttgcgctggcctatcagctcccgtatatgaaatataccttctatgatcagatgatggaggcgctgcaaatcaatgatacacagatgggagttctgggtacttgcctgaccctggttaacaccttgtgttatcctatcggcggcttttttgcggatcgttttccaatgaaaaagcttatctgcattaccctggctgcctttgcttttttgaccggactttttgcatttacaacgaattatattgttttaattggaattcatgtattatatggtttttttggtattgcaaccttatggtcagcgtacctttcgggtattcggagccttggagacgaggcgtctcagagtgcaatctttggaagcagcgaatccacacgcggaattctccagactattacgtcctttctctttctggggatcatgaatattgctgcaacgcctgttcttgggttccggtttgtcatgattgcaggtgcggcgattacagggctcttcctggttcttgctctgattttcctgcctgcggagaccgcggcggagcaggaaaaggagaaagaagaaaaggttctgctgagagaggtgttaaccaataagggggtatggatcaccatttgggttattatgtgttcttacgtttcctggacattggggaatggatatctgacgacttatacagttcgggttctgggtatttcctcttctttagcatccaccattggaattgtcagaagttatgtcattgtgctggcggcgggctttatcgggggatggatattggataagtttacctacaagggaaagggattcatggtattcctgtctgttaccgtggtcacaacactggcagtaatgtgcacaagtaaggtggttcctatctgtatcggacttacgctgtttcttgctttaatggctaatatcatgaaatcaacctattggagcataatggggcaggcaggcatacccttgaaaatgaccgcaattgccacaggggtgatttcctttattgcatttattcctgatttcatcgtgccgacgatctgcgggatatggctggatgctgcaatagaagcaggtaatatcgcatcaggattcaataaaatatttatactgctgattgcattttcggcggtgggaattgttggggcggcattgctggcgaggcagacaaaatcacatacctaaggcgccgccgcctcattattaggggcagtataatatgcaggaaaaggaggtattacatggcagaggtaagtgtggagcagataagaaattacaggctgtgcgcccatcatttggacgctgagtacagggaggaagacattatccagcttgcaggtgcatgcgggctgcagaatacgcctcccggtgcatgggagactgctctttataaccgggctccgggctgcagtctccagaagatggagtctctgctgtacaaagagaaatcgcttctccaggcctggagcctgagaggagcgccctttgtattccctgaggaggaaagcggtgtttttctgtctgcacttctttccgagggggatgagccatggatttacaatcaggggataacactggccctggattttctgcagatgtcttttgaagagttgttttctatattaaaagaggttatgccaaagctggacagggagactattgtgagcaaaacagccttagatcaaattctcgcagactggatgctgccacttctgcccgtcagaaaaagagagctatggactcagccgtcaatgtacgggaatccggacaggcagactgtgggaggcgcagtggtatctttcatgctacgtccctgcgccttcagcggacttgcagtctttggagagcgcaagggaatcagccaggagtttacttcctataaaaactggacgggccatgccatgaaagccggcaaagccccccaaaagcagctagtgcgcaaattcattcactgctatggacctgcaactgcagacaggcttacgtgctggcttgggtgctctggaaaacagggcagacgtatgtggaatttaattgcagaggaattagaaccagttaccgtatccgggaaaaaagcctttatcctatctggtgacagagaacggctcttctcaccggcggcctgtaaaagagagctgcttcttctgggaggtcatgatccatttctggaccagcgtgaccgaagtgtattgctggaggataactccctgcacagggaaatatggaaaactacaacaaatcccggggctattttgtacaggggagaaattattggcatctggaccagtaagaagaagagcaagggaatggagtttgcaataaacctgtggaagaattctcaggaaaaacaaaaactttccactctcgcagaacaatatgctgccttccggcagcagaaactggtgagcgttcatattaatagctgacataccacatgttacttctgtactttccccaatccttcatagtattgacggtttctgctgattttgttatgttttaattgtatttatctggggcctaactgtcccattgtttatcaaatatgttagcgataaatcggaatataaggaggtaactatggaacaggaatatattataaacgcttgcagcggtcaggcgattgacgtggtaaaagggcagaccataaccgtcattgatatggaaggcgggcaagttgtggacttttttgctgaactttcggataacccgaaggagtttttatcaactggtgttacaattgactgtaatgagtctttgagattaagagtaggggactatatttactccaatctttatcgtcctttattcaaggtgatatctgacgacgtaggagaacatgatttactgcatccttgctgccgcccagagatgtatgattttttttaccataatggaaaagatcatcccaattgtctggataacataaataaaagtttaaaagaaaccaggcagattatttaccctgtaaatctatttatgtacacaaaggcagataagaatggagatatagaggtcaaaaggcctctatcaaaagcgggagataaagtggttttgcaggcagaaatgaatatgcgtttagggattgctgcctgtagtgtatctgaaagtgactgcaatagtagaaaatgtacgccaataaggattgttgttgctgattgattaactttagtataccgatgtacctatctgggtgaggaccctgagggtgtttgggaaaatagatagctgtaaatgtgtctatcgaagatacatacactatgtatttatatcttgacggtttacttattacatggtagtataaacatacaaagtgtatgtaagaggtgattgtatgccaagaaataaatatcctgaggaaacagttcagacaattttagatgctgcttttaaacttttcacggaaaagggatatgaaaatactactgtactggatattgtggatcagatggggggcctgactcggggcgccttctatcatcattttaaatccaaagaagaagtgatgagtgctctcacagagcatatgttctataaggacaacccatttgagaaagtaaaaggggaagaggcgttgaccggtctggagaaactccggcagattatgaagaattcactggtggattctgattccagaagaattagtatccaggcgattcctctcctgaagaatcccaaattcctggcagagcttgttgagagtaaccgggatatgatagtgcctgcctaccaggagttaatagaagaggggattgctgatggctcggtccataccagttatccaaagcaggcggctgagattctttcatttctaactaatttctggctggccccgacgatttttccctttgacagggaggaggggattgcacgtgtgcgtatgattagaaaagttacggatgatatgggaattcctatttttgatgatgagataatgtatcttatagaggctatgttaaaagaattagaatagagttgcctgagaaggcaattttattttaaataaatacatacatacaacatgtataaaaggaggagtttatgacacaaaaagaaagaatagtgaatacaagattgtttagcagaaattttgcactactggtactggggcagattagctctctgtttgcaaatactgtattaagatttgccctgtctatgtacactctggaattaacaggttcggcagcagtttttgccggactgctggcggtatctatggttccaacaattatcctgtctccgttgggaggaattctggcagatcgggcaaaccggagaaatattatggtagctttagattttttgtcaggggttacagcacttattaccgttctcctgattcgggattccaatgcggtttgggtggcagggggtgtcctgataatgctgtctgttcttggggcttttgaatccccgaccgttcaggcggcagtcccgcagatgcagcggggggataatatcatcagagcaaatgcagtggtaaaccaggtagctgcccttgctgccctgattgcgccctttctgggaagtgcctgctatgttgcgtttggccttaaaccggtacttatagccagtgtgttctgcttttttctaacagcagtactggaagtattcatacagcttccctttgacagggaacctcacagtatgaagtggaaacagatgattaaaaacgatttgaaagaaagtctgtcctttatcacaaaggaaaaacctgggatctcaaaaatgctgctctctgtgtcggccgtcagcttctttcttatggggaccgtgaatgtgggaatgccgtttattatccggactgtattagggctgaatgcggaatatgtgggaattgctgaaagtatatgcggggcggcagctatagggggaagtgtcatcgtaggaattgccgttaaaagtcttaaggcatccgggatgtacagatatcttagtggggtagggatctgtatgattccaatggggctttctttcctgtcagagcacgttatggtgatctatggaattatagtggtatccattgcgtgtatgcagattttggtaagcatattttccatcttttgcctgtctctgattcagcagcagaccccggatgcgattctggggaaggtgatggcgtatgttgctaccataactctgtgtgcacagcctttcgggcagatgctctacggtattttgtttgatatatttagagaagatattatgtggattatgattgcttcagcattctgtattatactacttggccgtgcagcaaggaaaaccttccatgggattacctcagactcttttgcatgttcacgagaggaagagggagaatgcgcagtagaccagcagtaaggccatgacagtgttgaccatacgggcgtgcctggagaacagccatttaaacccggatccaaaagcagaccatagtagtgtaaacacaaaaccaataaaagcaagcagcaaggcaaagccgaaaagcagaagtgactgaccggcataataaggaagaatataagcctccattgacataatgcagtagatatatattttaggattgataaattgcagaagtaagccgggtaaaaaaccgtcatgggaatgggacgattccacagaagcagaactgcggaaagtttcccaagcgagatataacatatagcaggcccctgccaagagcataggtagtttgattctgggaatgaaggaggacagcagactacagaaggctgtacataatagcatcacgagagaaaatcctgtcaggattcccagattaaagggcaatgcaccgcgaaatccctttcggattccgttggacatagacataatattatttgggccgggtgtcacagcagtaattatggcataggtaagaaaagaaaaccagggaaacatcattgacctcctcattcatggtgtgataagatgatggaaaatagtgtaatataatagaattcttttatattgtactttaagttcattataatgtcaaggagatgaaaaaaagtatggaagttactaaaattgtagcggctaatgtaaaagatataagagagaaaaagaaactgacgttggacgcagcagccgagaccacaggggtttcccgtagtatgctggcgcagattgaaaagggggatgtaaaccctaccatatctgttctgtggaagatcgccaatggttataaagtttcatttactacactggtgaaggaaccggatgaacatgctgttatgataaagcgggcggcagcctcaccattcgcagaggataacgggcggtatcttaattaccctgcttttggatttgacgaacagaagttatttgagagctaccggattgttataaagcaggggggaagtctttccgcccagccccatgtggcgggagcagaagaatatattactgtattctatggaaacgttaagattacggtagaggaagagacataccatttggagcagggggattcgatacggttccttgcggatgtatcacatgcttatgaaaatgtgggagaagaggaagccagtttaagcatgctgatttactataactagtccgtttcttttttctttggttttcggttaagttttaaagtgatagtttggttttgagcggtttcccggaagagttttactgccagcgtggctcgctccttaaggggcagattatccttttgggtctttgctgtaagctgttccataaccgtcctgcagtcctctagatccagaaggttaacggccaggcaaaataagtttttctggcgtcctgcattgtagttttcaagtaaatggcgaaggattgcactcttttcttccagattagttagatattgtgccaggcctatggattgggctttggcaaagtcctttttttgatggctgtgggtaataaaagaatcaaattcatctattttgtcataatagacacaaggatactccctgcactgaaaacaatattctacattttcatgttgcatgctgcattttgcaatcttgcaggattgattgccgtctccccctccgcatccggggcaatagtgatccagatacatagggcagagcgcacagtttaatccgcatagggaaaacaaggtggattctctggcaaaattcttcatataatatctccttgtataatagcaactctttttgattcaaattggggtacttcttgaaagtttgattacggatgtcctgactcagaacctaccggtttctatgaaaattttatcgtataagattgttttgccaatcagtaaaaatatctgtcaaagtaagctacttgtatggtattattgtaacatgtaacttttttcaggtggatggttggctgttctgggtgatttaattttaccataaaccggtgcggagttgctatatttattacaaagataaaactcgtaagtatgcgggctttggcgtttcataaacaaataaataattatttcgtaaaaaggaggaatatattaagtatgaagaaatctatattggaaatgaaaactttaagaaaatataaagagtatttgtatgaagaagagcgcagtcaggctacgatcacaaaatatatgcgggatgttatgcagttctatcattacctcccggaggggtataaagtgattacaaaagaggttttggtcacatataagaacagcctgtctgataaatataaaatttccagtatcaacagtatgctcgctgcattaaacggattactggattttatgaagctaagctatctgaaattgaaacttcataagattcagcgctcggttttctacgaagaggaacaagaactgacaaaaaacgaatataagagattattggactgcgcgttgagaaaaggtaataaacgtctttatatgctgatgcagacaatttgcggtacgggtatcagagtatcggaacatcaatatatcacagttgaaagcttgaaagaaggcaaagctgttgtaaaaaacaaaggaaaaataagaattatatttataccggggaagcttaaaaaaatgctgaaggactactgccggaaagaaaatattatcaggggagctgtatttatcactaagagtggaaaacccatggaccgaagcaatatatggaacgcaatgaagaaactgtgcagggaagcaaaagtaagtgataaaaaggtatttccccataatcttagacatctgttcgcgttaacctactatcgaatgcaaaaagatgttgtaagactggcagatatacttggacatgccagtatagaaactacaagaacctatactatgacaacgggtaaagaatgtcagaagtctctttcaaagatgaatctggtagtccctatatatacgtaaaaaaccacataatatgtattatgtggtttttttaatgaacaaaaaacaagttctatttatttttagttcattatatagtatttggtaaaattttacaatacatttttctacaaaaaataaataaaagatgaagggctgcaatacatatgttacaacggaataatataaaaggtgaaaataccgtttctgtgctgggacggcagacactgtaacaggtattaatacattattttatgtcggagtaacaaattgtttgacaaacctacatattttacaataagtaaataaaaatttatatatgttattgctcacaagtcagtgtccagcaaagggtgttgctgtacaaggtttcaaattaagtatacaataactcccctgcactaccacataatacatattatgtggtagtgcaggggagtcggtaatgataaagaaaactagtaactttcgaaagaaaacgccatcgttatttcttgctgtaataattttattgtcagctgttttttcttctacggataatttgatggcatatgatgagtcaagcggatattgttttcaagtagcagagaatgaagagggcactgaggcagatattaaaggagatagcactaaaatttatgaaggggtagaaataatagaaattctggaccctgatggaagggccatggacttagacaatatttcttatcatgtcacccaaaatgatgtgtatttatttcaaatattttttagatcacccgctggggagcagaaagagaatatttcaatttccgtaaattcattattggattcagacacaaaaacaaataaggcagatgaaagttcagatccagaaacaaatatagataatgcgggtacagatgcagacccagaagcaaatgcaaataaaacggatgaaaattctgcttcagaaacaaagacagttggtgaattgaaggcggcaggaaagctagaacaaaaagcctcaacgccttttctcattcccatgcatattgagggggaagatacatctcagggaaactattctttctcgggcggagatattgtaaatattgaggaacagacatttaatgggctgccatataagtttcagcaggcagtgattttaatcatggagggcggtgatgcaaaaacatacccaataaattattatgatgaaattaatggcataaagtattatgcattgtcaggtaatgacagctcgccacaggattttgaaatcgcttatgaggtaccggaaggagcagacattttttttatctttagtttgaacacccagagttattctgtaactgtaaataattcaaaagaagcagaagggtttcaaattcaatatattaccggtataaaagaaaatcttgatggcactctcagcgccaaacataactcacatataaaactggtgttatcatatcctcccggatattttacggcaaatgcaccggagggaaaaaagaatgtgggtattgaatttagtgattcgtctgttccagtggcagaagaagaagatcagacgaaacgtacaatcagctatgaatttacttatccggataagccgatgactttgaatgtagtaggagataaggaaacaacaggcctgatgtatgggatatatgatgcaacatccaatcttcagcgtgcagagcaaggttcgaactggtggaaagcgacagatgcgagcggagcgtatacagagggacagccttattatgggtttggaagctacagcgaagcagataccggagtattaaaggtacggggaggaacagcaaaaaacgttaaaatagaagggaaagagacaccggtaagtatggccaccggatcctttgccagcgggcaggaactgcactttgaatatgcaattgaccgtgtaaatcaaaatggaaagccgccatatttcttctggccgtccccaaccgtgagtctttgctatttttcaaatggcgctgactatgcaaaggatgcacctattaccgaaaccttccccctctggtctcctgattggatttatgacccggatgcagggggagctgccgttatatcaaacacctataccgcagcggttggagctgagattacaattacagttaaaaaatctatctataccgaagtagggacaagcactgcgggggtaagattaaattatccttcttatcaggtacatgtaaagatagaaaacatgaaaaacagcttttatttaagaacacagggcgcggggagtgtacaggggccccattttttcagaaatctggataatatctctcttggattgaacaataatttgccggactcctattttctggaggatcatacagatgaaaagggcggggataccggcacagttggcgaaacaagcattaagagtggagggatgtttttagacaaacgtgcagtttataataaaaacataaccggtggaggcgttccctgggaggaggaaggaaaaccgttttttaaatttgggattactcccaaatggggatacacgaatccaagagtggaaagctatggagaagcatcgacgcctattatgacgaataaatcaattgaaatagagaaaaaggagcttgaaaataaaaacagccagaccacatatccggatttgactttggggaaatattcctggtttcatacgtcccaggacagaagagatataagcccttttcagtatgttctgtttatgccggttgaaagcttgtccacaaagcatgatatgcgggccattgatgtgaaaacagaaaaaatcataggaactgtcactaataatgctgactatgtgaatgataacgccgctcaaaactatattgtggagggggacggtatatttgatttattgttggaagacaaggttgtgtttaacccggattttaaagcccctgaagaaacaggcagggtatttgcaggattcactgtaacaattacggctccggataacttactgctgccggcagactataagctggagcttgcaaaaagtctggataactcggtttattttaaacccggtgatatcatcagcatttcagatttcttccgccgtgatacggctgtactgttaaaggcctggaacacaaatcatacacttacgccagaagaacagaagcgcctgaatctcattatgtattcatccaggctggatgcaaagataaaccttatatacgaggacgctgccagcagtcaggggcagaatatcagcgggaatgtgaataaatacctgcaggatgtgagtaaagacggaattatttattcaacccaaagggcagatacaaaaagtataaacgtcataaaagggaccaatattaagtttaacaaatttgcggagaccttcgtgaattccgttgatcaatatacgtattaccttaacgaggaaaatacaaccactgttgataaggtaaccgtggatcatcaggagattgcagctgtgaaatacgaccggggattaacagtcagctatttagatgagaatggcacctcctttgcaggactcagtgacgaaacggtatataaaacatatacggggagtaataaggctgtcatcaaatttcccaccggagcacaatgtccgccaggcaaggcatttgattactggacagtcactgagcttaatgacacaggaaactggataccgaagccagacattacattcagggagagtgatgcaccgcaagtgtatgaattcgcctccggcctaaatgcaaataataaaagtataagtcttcaggctgtgtggaaggatatttctcctgattcctacatatcaataccgaaaaatatacggttaagtgaaagcgggacaaaccttacacctgctgaagaatttgccgggacaaaagtaaccattgcatatcacagtgtcaataacagcgacaaagatattaatgtagatgttttaaagacttttgatctttccctgtctgcagacaatactaaaaagttgacggtttctgcgtacgacgcagacggaaacctcttaacagcagccggtatcaatgaaagctatgcgcgtatcggtacatttggcacagggaatccaagccgggaaatatggttcaacacaaaatctcagaacggaaatgaagtttataaagggagttttcatattagctctgattcagcggatgtagggcagggaaccctattttatatttccgcgccattatcagggggtgcaacgcgatgaagaaaataataactgcaggcattttaattatgctccttgtgattaacccatgtactatatctgcaaaggagagtgctgggaaatacaaaaatacaggacaaatggaagtaacctatacaccagataaaagacctcccatgttagaaatagataagggaaagggagtacatacagcaagtgcccaaacaggagatttcacggtttggattggtctggaagtactggtaattgcatcggcgacgctgctgatgttaattatatacattaaaaaaaggagaaacagagtatgaaaaaaaccaaattgatgagtgtattggcattaacagccatgatcagcgcaacaaccgttccggtatccgcagcaccggaaacagcaaccgcaggaacagaggtaacatatacggcaaattccgcggctccggatcaggcggattggctggtttcctatccaaaagaagcagttttgtctgactataacacaacagcagatacgggggtttcattaaattttaaactgttggataagctgggttcacaggattatagcggagacaggagtgttacgatttctgttaagaattatgggacaggacttgacatggacggtacgtcaggcacagttgtaatgggaattgcggatgatcagagagcggagttgactaatcctaactttacagtgggaactatggtaaagaaaggttccggaactgaaaatgcaagcacaggctacgcatatttaaaatcaacaacaaacccggaaggaacctatacaaaaaatgtgacctttacctttacagacgatgctgtttagagtacattctgataaacaagatggagtcagtcatttcaaaagactggctcctttttcaaataatcaaataaccgcaagggggaatgacctattaaatataagatgcggccgttatcgtatgcaaaacggacatataaggactctaccggcagtctctggaattatgtaaatgaagatgagctacaggcgatatatccaaatggtggatttaaagtattttcggatatgcatatgtgtggtaactccaaagcacagaattacctttccggccaaactacagagattggtgtttatccttacaaaaggaaacagtcctgggccaagaggactgtgggatatataccggtcacggatgcaaatgaagaagaaggctttatacggattataggcaatgcatggcagagggtcctcttcctcatattagcaatcctggtatgcgcagccatatttttggtgggtgtgtggtttgcacaaagagatgaggttcctggtctggataagacggctgtgtcttatcatatcgacggtgttaagaacacagatgaagactccattttgcttccgggactgagcgtactaaatggaaaggcaaatgatacacatattaaggcagtgttgatgaaccctgacggcaatggctgttacttcaaatatacaattatacagaaagattcagaagaggtcctctacacttccggccttatcgaacccggaaaagctgtaacagaatttgatcttaacaaaaagctgaaggccgggaagtaccccatccaagttatcgtagagacaaatgatttaaaaaatccagagatagtttataatgcaggcaatattgacgcacagcttgtagttacagaggaatgatgcgaggaggcaccgatggaagatctatgtaaccagaaagagaaacatgaggagatgaaatccttttcaagtcaagacagaaaggccggatatgtgcggattaaaaaaaagactttcagaaaagtcctgattactgtaataccgttactgttgttggctgccggagtgctaattgcattgttatataaccgcggaccggatctggacaaaaatgccattgcatatcagcttcccgacggggtgaaaaatacagatcccgattccattctgcttccgggatttgatgtccttgagatgaattatgcaacgcagaaagtagatgcagcttttttaaatccggaagggaatgaatgtttttttacttattctgtgacacttaaaagtgatgggacaaggctgtatcaaacaggactaataaaaccgggtacggctgtaacaagctttcaggcagagaaaaaattagaaaagggggagtatcccattatcatcctggttgaagccagtgacatgaaagaaccagaaaaaaaatataacggaggtgcagtggaggcagtactggaggtgaagtaagtgaagaagaaatgctttttatttgtcacaacattatttgttttacttatacttttaagcgcctgcagcggaaaaacgaaagcggacgagatcatagaggccggtcccgataagagcctgtccataaacaatatttccttttcagtggaagatatggactccggcaaagaggttaaaccagaagttccaagcggatactaccattattatgaagaacaagaggggtattattattatgttatttcaggaaaagtggtcaataaaggagcgtatgcattcgatgctgagaatatcaagatacaaggtgtcaatgacagtacaagctatgatggcagactccttttttcaaatcctgaggaaagtgagttcattaaggaaatcaggatgaatgaagaactgaagttttattttattatactgataaaagacggtgcgcctcctcctgacaaaattaatatattttatacaaaggatttcaaagtgccgcaggaagaccagccatatgatacattacttacatggacacttccttcattttgatgtaaaggaacggatggctcattggggatggcttacagacccggagctgtgacagggacagtaaaagaaagggtgtagaattgaaaacagatttattggaaaatatagcagaggcattgggaatttatataagtgacctaaggcatgaagatatccaaaagcagacactttcctatattatagggtgcaatggttatgaagcagtagagtggaacaaactgatccattatatgtttggtataaaatgtgatttcagcagtgagagcgaagcaaaggatttctatatcagaaagatagctgcaccagtatatcggaaaatttgatatttaaatttagcatgtataaatgggcatttttgttcggcgaaaagtctgcctggggtattccctcattctcccacgttttaccgaatttagtagaggctgctccattcctcggcagcaaggaaaccattctcattgcccctataacaatgtcccccattgtaatttttatgtacttgctattgcactttgggcagtggtttagagactgagatggggacttgtcaaagtgttttaggtgcgaacccccagtaaacatagaagtactgggggattcgcacctaaaacaggagtacaactggtcgcgtaaaggggcaaaggagaacatgagaaattgtatatttgtgtggtattaacagatttaaagtgataaaatgaaataaaattatatatatttgctgtcactgtctgcgagggcagtgtggattgaaattccatgtatttttcgagtttctcgccacaataagtcactgtctgcgagggcagtgtggattgaaatagaacagggaatatgttttcaaagaggggaaatggtcactgtctgcgagggcagtgtggattgaaatctttcccggattgaaccgtaaactcctaagttgccgtcactgtctgcgagggcagtgtggattgaaattggtcattatgataaaaagaaacgtgaagtctagtcactgtctgcgagggcagtgtggattgaaattatcactactcagccctatacgtttatcgacttacgtcactgtctgcgaggacagtgcgttgttttttgttatgttactaaatcaaattgagttaacataatcgggagggcatttgcgctcccgaaagtaactacagcaagtgcaaatagtctgtccacgacaaagcacaatgtagtaaaaaattctatttgtataaacttttccacttatcaggtgaaagtagaaagtattataaaatgcggcaatttttgggcatatggagcagtagcatgaaatattatgaataatgctggtgaagaaaagataataagcctcttaatatgttataatggcataacacactgccgcatgaaatattatgaataatgtaggtttagaatagataatacaaacattatgtgttataatatgtgttaattacggacataaattatctgcctgttgttattctttcattaaagtacagagaatggaaaaataacataatcagataagcattaggtctgtaaattaatatcattaaggaaggtgagcaattggaaaactataccaagtataagctaaaggggaacgacgagctggctgagttactggctgataaagataaaatgttcgtcattgcctgcaacaaatgcttcaaggaatttcagaccattgacgaaccagattgcggtgaatttgaaaaaatcgccgcggaacatggaaaaacaatcacaggaagcgcaaaggtcgattttttgtgcaacaaaactcagactgagagaaaattacaggatatgattcccgaaggtacggagcatgtttttgtaatttcttgcggcttgggtatccagacagttgcagacggggcaaaggtgcctgtatatgcggcaagcaatactttgaactatacaggacatcacggcatggcgttgactaaaaagcgctgtgatgcatgtgcccagtgctacctgaatataaccggaggagtctgtccaatcgttgactgctccaaaagtctggtcaatggacagtgcgggggcgctaagaatggaaaatgtgaagtggatccggacaaagattgtgcctgggaaaaaatcaatagtaaattggagaagcagggacgtcttgaagaatttttgaatcagccggttcagttacgagactattctaaagttaattttaatgttattaatgaatatgtaaaatctatccgtgaggaaaggtttgcaggctattatggcggtgttcatccatcagaacgcaaaggattcagcgagcatattgcactggaaagatttccggaaccgaaaacggttgtcatttccatgtcacaacatttaggcgctccggcaaatcctattgtccaagtgggtgatacagtgaaggtcggtcagaagatcgctgaagctgcaggctttatcagtgctcctgttcattctagtgtcagcggaactgttgttgcaattgagccgcgcctgcatgctacaagaggcagcgaagttatggctgttgtcatcgaatcagatggaaaaaatactctgtacgaatctgtaaaaccaaataaagatttagaagaccttacgccggatgaaatcatcgagattgttcgagaggccgggattgtaggtatgggaggtgccggtttcccgacatctgtcaaattgaaaccgaacaagccaattgaggctattttgctcaacggctgtgaatgtgaaccgcttttgacagcagaccatagagtgcttctggagtttgcagatgatattatttacggtcttaaggccatgattaaaactgttgacgctcagaaaggtattattgttatagaggataataagccggatgctgttgaacttatggaagcgaaaactgctgactgtgacgaaatcgaagttgtagtggctaagacaaaatacccccagggtgctgaaaagatgctgattaagcatattatgggaagacaggtaccgcggggtggactaccggcagatgttggggttgtagttagcaacatcagcacggtcaaggctgtttctgatgcgattcagaagggcatgccgctgattgaacgtgttgctaccataaccggtgaaaagatgaagaagccgggcaactacatcgtgaagatcggtaccaatgtaaaagagctgattgactactgcggcggattcacagatgatgatgttatggtcaagatgggcggaccaatgatggggtttgctctatcagatttgaatgtaccaatgatgaaaggctccaatggaatcattgctattgacactgatcagacacaggagatgtcatgtatcaaatgcggacgctgtgtggacgtgtgtccgatggagcttgctccgctgtattatgcaaaactagcagacgagcagaaatggcaggatatgcgtgacagagatgtcatggattgtattgagtgcaggagctgtgaatatatatgttcctccaagattccattagtcagcaaaattaaggctggaaaaaatgcgataagggagatgaagtgatatgttaattacccaattaaaagcaaaggaaactatcgtatcactggtgggcggaaagaaagtttttatcattaactgccagggatgcaaagaagttcatttcccggaaaaagaagccgcagaatttcagaaagagctggctgacgacgggaatgtgacaggaatcattacaactgactatatttgtaatccggaaaatatgaagctgcgtcttcagaagcatatgagtgcaattgaagctgcagatgtggtgttggtattctcctgcggcgtcggtgtacagacaattgccgagtacctggaggataaaaaggtatgtgcagcatgtgatacatatccattgccgggattccagggtgtgacacctttagaatatgactgcgatcagtgcggagaatgttatctgaacatcactggcggtatctgtccgattaccgcttgctccaaaagtctggtcaacggaccatgcgggggtaccaaaaacggcaaatgcgaagtggacggagatatggaatgcggctgggagcgtatttacagacgccttgcacagcttggacgtcaggatgcactgaaatgtccggtacaggtacgtaattatgcaaccgatgatgaagtgtctaaacaaacagagaactgttaaaattcatgtgactattcagcgggtagtatcccgcgtggtaactatgatgggactgaatggttacaaatttataatgattaggagtaagggagaatgaatattactgaattatttcaacgtggtgaatttgtagtttctgcagaagtaggaccgccgaaaggaaccaatattgaccatcttgtagaagaagcaaagacttatctgaccggtgttacagcggtgaacgtaacagataaccagtcttccgttatgcgtctgggctctctggcgacatgtaaggtattgaaggatgaaggactaacaccaatctatcagttgacctgccgtgacagaaaccgtatcgcactgcagtcagatcttttgagcgcagctatgttaggaattgaaaacctgctgctcttaaccggagatcacaccaagatgggagatcatccccaggctaaaccagtttttgatctggattctgtttccctgattcatacagtaaaaatgctggaatcaggctatgaccttggcggaaatgagctggtgggagaacctcctaagtttgcaaagggtgcagtagtatcaccctgcagtgattctgttgacgcacagcttgcaaagatggaacgaaaagtaatggctggtgctgactacttccagacgcaggcagtttatgaacctgaaaaattcattgaatttatggaaaaggcaaaacagtttggaaaacctgttcagctgggtattgtaattccgaaatctgtgggaatggcaaggttcatgaacgcgaatgtagcaggtatccatgttccggaatcaatgatcgacgaactgaaagccgataaagaaaaaacaaaagcaggtatcactggtgttgagatcgctgcacgtattatcaaagagtgtaaaccatactgtcagggtgtacatatcatggcattgggttgggaatctaaaataccggatcttcttaagctggccggaatttaatattctaaggactgtcagttaatacggagttttagtccttgtagtatataataagaacattccggcaggaatcaggagtagttatacttgattttcctgcgggagtgttctttttctttcatctaaaaatatactgacgatgggaatatgataaaaataatggccctaatttaaaaaggaactgtcaaagccctaagataagtgacgagaacttgagaatgttgagaagctattgtatatttatcgagaaagaagaaggcagtaaatcttacacattatttggtgcgaatgtcaagtgcacataaaaatactgggagattcgcaccaagataattgaaaaatagttatcattaaggggccaaaaggttaagggaaaactttaaaattgtttagtattaataaataaatggaagataatgcaaatgttattgtgcatttttgctgtcactgtccgtgagggcagtgtggattgaaataatacgtcttgagggtatttctggtgttcctaccggtcactgtccgtgagggcagtgtggattgaaattgtacgcagttaagtccttttccgcatccgattcgtcactgtccgtgagggcagtgtggattgaaatctcttatattaccgcattataaccagggatagcagtcactgtccgtgagggcagtgtggattgaaatcttaagctccagctcgtccgctatgtctcctgggtcactgtccgtgagggcagtgtggattgaaatcgcatagttgaagtccgtgcagatgtacggcacggtcactgtccgtgagggcagtgtggattgaaataaattctttgtcagactgataatctgactttttgtcactgtccgtgagggcagtgtgaattgaaataatggtggttactgtgaaggagaaaggcttaaagtcactgtccccgagaacagctgattataaaaacatcggactacgcagattgtggatggcagcagatatgattgccggagacctgatttgttctaaagattttttcatgagcttcttataaaataatttaataaattaagacaggggcagctgaatcctctgggcagtgagctaagagctggtatcataaatgtgatactggctttttttgatggaaaaatgcacaaaggaacataaacatccggatgtgccgaagcaaaaataacgtatatggatgtgtgcttagaaagaaatacggtaaaagtactaaatatatggttaaacactccccgaaaaagtgaaaaagtatacagtcagaattaaaaagtgaaagagacaaaaattaaaaagtgttaggattacaccataagataacaatacaggacggaggagagttagatgagagagaacagattctctttagatggaaaagtggccctggttacagggggagcttatggaattgggttcgccatggctcgggcgttggcagaagcaggggcacaaattgcttttaactgcaggagcaaagagcacagggatcaggcgctggaagcatataaccaggttgggatcgcggctcagggatatctctgtgacgtgacacaggaggaagaggtacgggctatgaccgcagagatcgcaaagtctctgggaacggtagatatactggttaacaatgcagggattattaagcggatccctatgcatgaaaccagcgtagaggaatttcggaaggtagtagatatagacctaaatgctccctttattgtggcaaaagcagtaattcccggcatgatagaaaaaggacacggtaagattattaatgtgtgttctatgatgagcgagctgggacgggagactgtgtctgcctatgctgcggcaaagggagggcttaagatgcttacaaagaacattgcatcagaatacggagcatacaacatacagtgcaacgggatcggaccgggttatattgcaacccctcagacagagccactgagaaggatgcaggagaatggggagagacacccctttgatcagtttattatctccaggacaccggcctcacgctggggtactccggaagatttggcaggtccggctgtctttctggcatcttcggcgtctgactttgtaaacggacatattctgtatgtggatggaggcatccttgcatatatcggaaagcagccctagaggcggaagcgttcagaatcatggaaaagaggaaaaaaagatgagagcagcaaagcttataagcgcaggaaagattgagatagaggagacagagaaaccggtgatccggcatccgggcgaggtactggtagaagtgaaagccgtgggaatctgcggaacggacttacatatttttcggggggagagggatgatgtagagcttccccgtgttatgggacatgaattatccggtatcgtaagagagacaggaacacaggtgacccgggtgaagacaggcgacagggtggttttggatccggtgtttgcctgtggagagtgtaaaacctgtaaaagcggccatgtgaatgtgtgcagcagcgtaaagtgctatggcgtgcagatggacggtggatttcaggattatattgttgtagaggagagccacctctatccttttggagaagatgtttcatttgaatcggcagctttggcagaaccattttctattgccgctaatatagtggcgaggaccggggttatacctgaagataaagtggtggttattggaagcgggaccattggactttgcattgtacaagccataaaagggattggcgcagcggttctggtatcggatgtggttgagtcaaaactgtccagagcgaaggaagccggtgcggacgacactgtaaacagcagaacacactctctggaggatgcggttgagcggtttgcgcctggaggtgcggacgtggtgatagatgcggtagggattgcggccctgaccgagcagatgcctgacctggcagcgccggccggccggctggccgtcattgggtttgacggagcgcctgcagggataccgccggttaaaattacgaaaaaggaactgacgattgtgggatccaggatgaactgccgcagatttccgaaggtgatggagtggctcagagagggaaaaatcaacgaagatcttatgatttccaggaaatatccggtggaagagattcagaaggcgtttgaagaaaccctggcggacgggcaggatacggtcaaaactttgattttgttttagaaatatgagcagagggctgacggaacaaggagtgtccccgaacgaaggaggtagaaaatgaagaaaaaaatatttggaaaaagcgcccggccgtatctgatgctgcttcccacatttgcgattattgggatatttatgctgtatccgattttaaatacattttttctgagtacacagaatcatgtactcacgaatatgaaggacgcagggtttgtggggctggacaatttcaaaactctgctgcaggatgagacgtttataaaggcagcaggcaattctctctggtggacggtagtaaatgtggggctgcaggcgttttttggccttctggttgccctgctgctgaatatgaaatttaaagggagaggattattccgtgccctgatgtttacaccttgggcggtgggcggtattctggtagccctaatctggagctttatgtttaatgaaagtgttggagtagtgggagaccttctgatgaaatttgggatactggatcatcgtatgtcatggttttccgatggaacactttccatgtgggctctgacgattgcaaatacctggagggggattcccttttttgctatcagcattctttcaagtcttcagactatatccgttgaggtatatgaatctgctgatgtagacggggcaaatgcctggacaaagttctggaagataacactgccgcttatcaaggataccttactgctgacgatcttactccgtacaatctggaccttgaatgtggtagatatcatctatggaatgacaaaggggggacccaatttctcaacccttacgattcctgtatatatcatgatggtgttcaatgatactctggatgcaggatatgcttcggctatggctgtactgatgattctggccctgctgatcttttctgccatctatcttaaggtaggaaaatacggagaggaggagtactactgatgaataaaaaggtaaaaaagagactgagtaaaatctttggctgctatcttcccattatactgtttacggcttttattatcttccctttctactggtttttatgtacttcgctgaaggaagagggcagtattatggaactccctatccgatatctgcccaccccgtttactttggacaactataagaatatgctggccagtatgggatttgataaatactttgtgaacagtctgattgtctcagtggtgactacagtcatcattatgattgtgtcaatctggggaggatttgcaatctcaagatacaagttcagaggcaaaaagcttacgttctttatgctcctgattacacagatgctgccaggtgttgtaatattgattccactgtttactatatttaacaaactgggtctgatcaacaatctctggtctctgattattacgaatactacggtaaacctgccgttctgtatgattatgatgagcggattcttttcagggattccggcaaccctggaggaggctgctcagattgacggatgttccatctggaaagccatatttaagatagtagttccatccatcatgcctggagtggtatccagcagtgcgtttgctttcgtgaattcctggaatgagtttgtatatgctctgaattttattaatgactccagtaagtttacccttccggttggactgagtatgatgaaaggtgagttcacggtaaattatgggggactggctgccggaactatagttgcactgataccggtactgctgatattctgctacattcagaaatatctggtagaggggatgtctgccggagctgtgaagggttaacacaataaccataaggagaataaaacgatgaggtataaagaaaactgggaagagacaaaggaaaaatggcgccggtactggaaacatgagaatacaggaagacctctcatgtgcgtcatagccagaaaaccggagattgaggaggcggctcaaactatggaagctgccgacgtgtgccgcagtgaggggcggtattaccgtcttccggaagaactgaactgtaaaaatcccgaggaaaaatatctgaacgcagaaaaaatagtgggaagatatcggcatttttgtgaaacccatgagtttctgggggaaagctttcccaatatgaatgtggatttcgggccgggaagtctggcggcgtatcttggcgcagacattgtatttaacgatgataccatttggtttgaaccctgcattgacgattgggatggccagccgccctttgcattccgggaggataacccgtggtttaagcgtcatatggaactgacaaaggagtgtgtggcgctggctggggatgacttttatgtctgtattccggatttgatggagaatctggatgtgatagcagcgctgagaggccccatgccaatgatttacgacttgatagaggaaccggaagaaattgaagcccgggtaaaacagattggggatctctactttgaatactatgacagattttatgaacttgtgaagaaccaaaaggatcagggcagtgcctatatggtattccaaatctggggggagggaaagacagctaaactgcagtgcgatttcggcgccatgatatccccggatcatttccggaaatttgtattggattctctgaaggaacaggcgtcaaagctggatcaggtggtttaccatctggacggcccggacaatatcaagcacctggatgcaattcttgaagtagagggcatcgatgcaattcagtggacaagcggggatgcaggccctgacggaaccctggaaaaatgggatgagatttatgataaggccatagccgctggaaaatctatatgggtgaaggtatatagcggggaatttgaagactggctgaccaatgcggacaggctggtaaaacgttacggctctcacagtttatttctgcattttccggaaatgtctaaggaacaggcagattgccttctggattatgcggaaaagaactggcgggatatagaaggaacatttaaaataaaagagtaaaggagaattggaatgagaaagaaaagacttatggggttacttctgacaggagtactgagtatgacaatgctggcaggctgcggaggcgatagcggggacaaggaatcttccgggagcaaggacgatggaaagcagcaggaggcatccggggaaaaacaaaccatcgaattctggtatcatgatgggaatcctacatctaatccaatttttgaggagctgattaaacgatttgaggataaatatcctcagtatgaggtgaagtatgtaggactgcctgctgactcctacctgcagaagtacaataccgcagtggctactaatactgtgccggacgtagtgagtattcgggatatggacgtttcctcatttataaatcaggacgccctgatgtgcctggacgaagtgtatgatgaattttctgaaaaagagaatctgaatgaggcagtaatcgaggcaactcgtctatgttccattgataagaagctgtattgtctgccccagtatattactacagatatttcctggtgcaatacgcagcttatgaaggaaaaaggcattgaagttccgaagacattggatgagtttatggctgactgtgaaaaatatgcagatccggacaatggttcttatttctactccctgagaggcggagccggttctatggagaatctgtttgactttatttttacctatgcagatcaggacagcatgttcgacgaagaaggaaactgcgtgctttcccagcctatttttgccgaggccatggacatgtatgcaagtatatactggaatggatggacttctaaggacagtgtaaccaacagctttaaagaaatggtagctgagttcggttctaagaccagtatgtatatcagtcacaattcatcctcccttgctgagcataaaaagaatctgggggaaggaaactttgaaaatgtcattgcacccgcgaataaacagggaaatgtggtaactaagaatttgtctttcaccggatattccgtgatggaaaatgctaaaaataaggagggggccattgcgtttattgaatatctggtatcctgtgagggagcttcttatctctgtgagcaggagggcagagttcctatcaataatttgatttatgatgaagaatggtataaaaacgatccttacaacggcatttacagggaattgatggaggcggaaaatgtaaaattccttacccatccggtatggcttacccagtggaatgaattcagaagcaaatatcaggaacctggattccaggccgtactgctgaaggagaagacatcggaggaagtcttaaaagagtgggcagattatctgaccgcagcgcagaaagaatatctggaggcaaataaataaagtgatggaaaaggtagattatagaaaagcttaccaaaaaaaagtaagatttgtccgggcagaactatacagatttcagccgctgaagctgccgagggagttctgggattctacagggggaccgtttgatacggttcccgtggatgcctggctgatcttgtacaaccaaaacggtacggccgggcagtgtccctgctcggaaaggatgaagcagtttttgaagctcattacaggaaatggagaaaaaagctatgaggactggtaccatatgctctactgggcagtccgaaactgcggtttttcaagcgaagcagcactggagctgggaagactggatctggcttttcatgatatgatggcaaaagaagaaaatcttcctctccaccgattcctgggagctgacagagactgggttgaagtgtatgccagcggatgcggtacgaatctgacagaccgggagatggaagaggaaataaaatcttatcaggctggagggtacaccacgtttaagatgaagtgtgccggttcttttggcacctgtattgacagggatgtggagcgtgttcggatggtccgctccctgcttggccgggaggcaaggctggccatagatgtgaatcagctgtggaatgcagaggaagcgctgagatttgcggacaaagtggagaagtttgatattgcctggtttgaggagccggttcattcctatgatatgacagagcttgccaaactgacgaaactgtcgccgattcccatagctatgggggagtcacccagatgctattatcctatggaatcctatgtaagggcgggagttgctcagctgcagccgattcccagcaatctcagctcggtggaggactggatgaagacaaagcggctggccgtggagcataatctggaacttacgtccgggggatattcccatctgacggcttcctttatcgcaacgggcagacaagaggatatggtggagtatctgattcctgttatgcagccattttacgagattatggaactaagaccggaggagaagaacggcaggttttatcttccccaggaaccgggaattagtatgtcccctgacatccgggggcttgaacgaagcggcatgctgagcggtaaggagtatttttgatataagcctgaactagaaaatatttatagtggcatagaatgtgggcacacagatgaggctgcctgacagaaaaaggaggatttgtttttctgtcaggctgtgcctctatttggcgttttcggacaaaagaggtcagggggagaacactgatgaaaagatggatggaatggtttcagaaccattcgctgcgttttaaaatggtggtgctgctgtttgcggtagtggttgtacttcaggtgtttaacgggcttgtatttacctctattgtgtcaaataaatttgaggagaatatatcggagtcaaatttaaaaacggtgcagcagatggctattaatctgaaccaggccatggaggatattgtagatgagatggttcccatacgggacgaggtgctcagccggcagattctcaatgacggagaagaggattccaacgattatatcagccagtatatagtatatcagggaatgtttaatcaactcatagcagcagataataactatcagttcataaattccatgctgattctcaacggcagccagaactatacctttgtactggacgagtatctcaagctcaacggggagcccctttttgagaaaattcttaaagacaacaagatgacaaagcaatgtcagtggggagcgcctgttccggacagctactttttttctagagataaggaacaggtaatcagtatcataatgccggtttacagatacggggaggtaaaaagtatgctgattgtaaatctcagagaggaggcaatccgcaaatatctggagaagcttggagggggcgacagtacactgatgcttcaatttgacagagataatgcagtgtttggacagcctgaacagtgggaaagatttacccctgaggagcagaaggcattgatgaagtttgaaggctgggaggaagtagaggagattggcagcagcgttgctatgagcagcctgctgtccgtgaaccagtggaagatttctatggttacagccaaaagcagtatcagcagcagtgcaaaggtactctcgcagtatattattgtaatcatatttaccacagggatcgtgctttttgtgtgcgtatcctatattgtatttattgttacgaagccaatcaaaaaaatgacggaaaccatagaggcgaaccggcataccaggcagatcacccatcgctttcaccccagatacagagatgaggtaggggtgcttgcagcagcatacaatcagctgatggatgagattcagcagctgatggcggatattgaaaaagagcagatacaaagccggaagaattatgtgaaaatgctgcagatgcagataaagccgcatttcttatataatactctggaggcagccaaattcctggtggagatgggggaccccaacggaattgaaatgcttactacggtaggaaaattttacaaactaagtctcagcggaatctatgatcaggtaaccatccgggaggagacagaacatctgacttgttatctccagattctcaaactcaggtacaattcgaaatatgagtattccgtagaggtggatgaaaaaatcatggagaatgaaattatcaagttttcccttcagccgctggtggaaaatgcagtataccatgggatcaagcggcagagaaaaaagggatttattaaagtcctggggtatcaggaagagaatatgattgttcttgcagtatgggacaatggtgcgggaatagaaaaagagaagctggaagcacttcaaaagaaactcggatttgcggagaatattcagacggcggaccacattggggtcatgaatgtacaccagagaatccggatgcagtatggagaaccctacgggctttccatcagcagtgaagaaggggtatttacaagagcggaagtaaggcttcctgtgagaaaaatgcgggattgaaaggggtggcgggcatgtataaacttttaattgcagatgatgatgagatcatctgcagaggattggggacttgtattccttgggaggagaataatattgagataacggggctcgtctatgacggagagatggctctggagtgtgtggagcgtgagaaaccggatattgtgattgttgatattaatatgccctttatggatgggattgagttttcttatgctgtgaggcaaaactatcctgagataaaaataataatgctgacggcatacaaagaattcgcgtatgcacagaaggcagtcaaacttcaggtgtttgaatatctcacaaagccttttaccaatgaggaagtgctggaggctgtgaggcgtgcggcagatgcattggaggaagagagaaattaccgaagcaggatacagagaaacctggggatgattcaggaaaagaatctggaggagctgactctctacgggactgtagaagaagagactataaaaaacagcggaatctgttcccctgaaaattatttccaggcggttatcttgtatctgagaaggatacccggtgaaaaagagggcggaaaacatgcattgattgaggatgaggtggcgctgcgcatggcggccgataagctgcggacactgataagcagggagaaagactgcagcctgttcctgcaaagcaaccggattgtattagtattcgaatataaggacagaaacgcaggcaaaaaagttagagaacgcattaccgggataatgggggaaattgctaaagaggatactgtatttcttgcaggaggcgttggcagggtatgtcatggcgctgagagactgccgtcctcttaccaggaagcggtctacgcattggagcagcggtatggctatggaaaccggagcgtcattctgtacacggaggttcagggcaaggcggcggagtatgacgtggaacttcccgctgtcagaaaaaggctgcaggagggcgtgcagcagcgaagttcggaaaaaatacgtcaggaagtggaatgcttgtttcagaaattaaaaagaacagagagggcaaacttgccgtcagtacagttcctgcttgtagagcttctgcggttttgctgggaaatgacggaagagggagagttgtatgaaacctttctgaaacagtatggacagctgttctccaggatgatagccgccaggaatctgtgggaactaagagaagcggcagatatgtattttaataatttatacagctatttagacgctcagaatactacagacatagaaaaacgggtaaaccaggcagtagaatttattaaagagaactttccggatccggatctaaatttgaatgatgtggccagacatgtgaacctgagcgccagctatcttggcaattcgatcaaaaagtataagaaaacgtcgtatgtcagtctgctaaaccaaatccgcattgacaatgccaaaaagctgctggcaagaccggacattaaaacctatgaggtggcatttctggtgggattcaattcttcccaatactttagcagcagctttaaaaagagtacgggaatgactcccggggcgtaccgggagagtgcgtttgcaaagcagaatggtgttgggtagttggttgagatctgcatatttgcttatggaatcgtatactataatgaaattaagcgccacggagaaggggggaaagacattggggaggactaagaaagtactcatgcggtaaggacttccgaatataatagtaaaaagcagtttgggagtatttgttgtgaaaaaaatacagtggaagcctctgcttggaagcctgcttatcagtcttggcacaggggcggtctcagcatttcttgcttcggatagtatggagaagtacagcagtctttataagcctccccttgcccctccgggatgggcatttccggtggtgtggaatattttgtttatacttatgggggttgccgcctatatcatttatgagtccgatgcacccggaaaagcgcaggctttaaaactctacggagtgcagcttctggtaaatgccttctggtctgtaatttttttcaggtttgatgcatactttctggcatttgcatggctgctcctgctttggtaccttgtctatctgacgataaagcagtttaaggatatcaatgagacagctgcacgattattgatcccctatcttgtgtggcttacatttgccgggtatctgaaccttgccatagcggtacattatattttttgacctatcaggtatagattaaaaaaaatatgctgatactaaaagaaaaaggcagaaagaaggtactcctatggaagaacatacaaaaaaactcctggaggaatgtaattccggctgcaaaatggctgtgaacagtatggaccaggtcagtgaatatatcgaggacgagaagctgagccaggtagttggggtttaccgggataagcataaaaaaattgaggacaaatcctcagaacttctgcagagatatggagagacgggcaaggagcctggagctgcagcctctgtattctcctggtttaccacagagataaagctgatgcttaaggatgacagaaaccagattgccaagcttctgatggatggctgtaatatggggattcagtctatcagcgaagacagaaacaagtatagcggcgcatcgaaagagagcatggatctggcaaatgaactggtgggcattgaaggggatttcatgtgggaattaaaatattttttataaaatagacaataaataaagaaatgacaaagccttgaagggattcagggcttttttctttggaaataattggataataattcataatacattgccgaaattatgtgataaaattaatatagttaacagaaaagtttggtaagaagttaccacagaaaagtacataggatgggcgggacttaatatgttaaaaatagtagttgttgatgatgaagagatcatctgtgatttaatctgtgctttaattgactgggaaaaatatcagatgcagctgctgggctgtgtgtatgacggagaggaagcctttgaggtcatctgcgataagcgaccggatgtagtaataacggatattcgtatgcctgggatggacggattggagatgataaaaaaggcaagagaggagaagatagaggctcagttcctgattttaagcggctataaagatttctcttatgcacaggaagctatccgattaggagctgctgcctatttgctgaaacccatcgaagaagaggaacttctgaataccctcttgaagattcaggagaaaaatgaaattgcaatggagcagtcaaaggagaagcaggcgctgaaccagcagcttgtggacagcaggcataggctgtggcatcagtttttgacggattttctggaaggaagagagactgcaaagtatggactgaaggaagtaacagaagaagagattaacagggtgtttggaccaaaattttgcgggggcctgtaccgggcagcggtgttaagatgggataatccatacggaagcatcacagaggaggagtccaggtatcttaccggaaagtgtatcgactttttttgcacctgccttcctgagtcaatggtttggtatgccgcagaaacgaaggaatgccaattggtgcttttaaacggtacagaggaggaaacggggcaggaagtttggactgcatttcataaaatgcaggcttacgcctctgcgctcaatgagggcgtggtgaccgcaggactcagtcgtactgcacaggtaccggccatggtgcctgctttggcaaaagaggcggagaaggcctgcagcatgcggattctaaaagggtgcgggaagatattggaatatgatgcagctgcattctccccttgcaaggtggaggagcttctgagtatgaaaaaggcgaaggagctgcaggagcgtctggaacttatggattgggaacagatgaaagatgcagcaagggagctttatgaaaatataccgggagaggcggatccggatgtgtactatcagctgcatctgagaattctgacagaggtacttcagggtttgagctatctgggagcagaggtggcggatatgcgcgggcttatagagcgaatgtgcagagaactgcgctgctgcagcagtatcgctcagattatcagaaagacgaacgggcagatacaggaaattctattgtcctgcaaagaacagtccgtcttaaaggagaaccgtctggccaacattgcaaaagagtacatcagaaagaattataataaagatatccgtctggcggatgtggcggaacaggtctatttgagcccaacctatttcagcgctatttttaaaagggaaacaggaatgaattttaatgagtatttgacagaataccggatagaaatggccaaggagtttttaaagaatctggaatacaaagtgactgaggtgggagagcaggtagggtatgaggattccaaatatttcagcaaaatatttcggaaaatggtggggatatcccccagggattacagaaagttatatatgcgggataagatatgaaaatggtaaataaaatcagaacctggtaccgaaaaaggaaagaatattatcatgtgcaggcagggcttagggggattctgcttgggtggggtttttgcatgatactgctgatcacggggtttgcactggctgcgtttcagattgctgcccgggaggcccggagggagaaaaacagtgcatatgagacaatggtttcctacgtgaccggtgaaatagagaagaaatgtgcacttctcagcggactggcagaagaggccgcagagattccacgggagcacagggaggaactggttcaggcctttgaggggatggatggactggcagtctgggaaaatggggaaatcgcctgttttccaagagaagaagcactgtttttgggatttctggagagtcataaaggacagttgacagatcccgggaacggacagaagctattgatgggaaccagcagcagttctcggtaccgtgtgggaaatcttcagctggggtggatacattcggaggcggagaaaaacattatggtctccagtaccctggaggtttccatggattccgcctgtgaattttacatatatagtccggacagcaacatggtatatcctcagggatacctaaggcccgatttttccgaggtaaaagcaaaacttaggggaagctaccagggcaaagcaatccggattccgtcttacacggtatttctgcagaagagcagcacctatggtttttatgggcttctctgtgtgagaaacgaaaagctggaaacagaatttaccggctatctatggctgctgggaacctcggtcggtatacttctgattctactgctgggtacgtttgtgatctttaaaaagaaggtatataatcctgtgatacatgtggaacatgcgattaacgggattcttaacggcaatcagggactggaagtagagattgacgattccagtgagctggcctctgcggggagggctgttaattcaatgataacccatgttgagaatctgacttccagggagtaccagtcagagatactgaagcgccaggcggagctgaatgcacttcagaatcagatcaatcctcattttctgtacaacacccttgagtcaatccgtggtctggctttgcgggaggggtcgaaaaatgctgctaatatgacaaaagcattggcaaatctctttcggtataacattgataaccggagtcttaccgttactctgcaggaagagctgacaaatattgataattatttcgtgatacagaagtacaggttttccaataagatccggcttgtgacatatattgacgaagagaatccccagctgagacagtatcaggtgccccatatggtgctgcagcctatagtagaaaacgcagtatgtcatggactggagacaaagcggggaggaggaaccattgtcatcatggttatggcaacagagagcaggctgattattacagtcagtgacgacggcctggggatggatgagaaaaccctggaccggattgaagaacagcttcagaggggctacacctccggcagagccggagagcggacgggtattgctctgtacaatgtaaatgagagaattcgtatactccatggggaggattacgggattcatgtgcacagcacaaaggggatcggcacagaagtagaggtggttttgcctctgatctgtcaggagtcaaaatcataaaaaagaacaccttttcataaggcggtctgttttttaaaatagaccgtctttttataattaaaatataaccggaggataaaaatgaacagggagatcttaaggttacagtccattacccagagactctatggaaacaaagtgctttctaacatttatttcaatctgtatgaaggtgagattcatgggatcattgggattaatggagcaggcaaatccactttagcccgggtcatcgccggatggcagcagggatatgagggcactatttttctggaaaatcagaaggtacgtcttgcatcggcagaaatggcaatgcatatgggaatcgctatggtaccccaggatccggacacaatcagcaccatgagtattgcagagtatatctttacgctgagaaaggaagcatcaaaacgtgtcctgcttcgaaggagagagatggaaggcagaaccattaagctgctggaggagatgggatatcccctgcctccggggaggaccatgggggaattgaccagaagccagaaaaaatttatgtcaatcgctaaaaccctcacttataatcccaaaatacttatttttgatgacaccgagattggcatggagcctgaagacgttaatttgttctgggggattattaagaaacagtgtttaaaagggatatcctgtatcgtgatttcacagaatctgccgagactttcagcggagtgcggcaggataacggttctaagaggcgggaggattgcgggcacggtaaaaaacggcagctgcccggaggctcatattatgaacctggtactgggcacgaaggatagagagggtgacaaaatctcagagatacatctgggaagggagatactccgcctggaggacatcagaggaatttatctgaagaaggttagtttttccatagcccagggagaaattctgggactgacaggggcagatgacgcgggaaaggaagagctgggagatattctctatggctgtaaaaagtaccggtcgggaagcctatatttctgcggtcagcctgttacagtgaaagactcacatgaggcagtgcgtatggggattggctttatccccgaagagaggaataggcttcttttggaaaaccagacggtaaaggataatcttacttttctgcagatgcagacagcaaaaaataggtttggatacctgaagccaagcatagccgggtatctggcaagagactggtgcgaaaaggagaatatcagtgagttcgccaagaatactcttaatgaggtgggcggcaatatccggcaaaagctgctgcttggccgatggcaggataaaactttaaagctgcttcttctaaaccatcctaccaacgggctggagcaaaaggaacgaaggaagacgctggaaagaatattggagtacagcaaaaacggcacggcagtattgctgattaccaatgatctgcaggagctggtctccctgtgtcacagagtaattgtcctgaaaaaaggcgagatctccggagagatttataaagaagaattgtcagagatggcggtaacaaaacttaaacttatgtaacggaaaatgaataggaaagagggatggcatgaacagcagagaacgtgtacaggcagttctgaccggaaaaccggcggatcgtctgcctgtagattttcatttcgcagatgatacggccctgcaggtattcgccggtcattatggcatgggagaggaagaatttttgacatatttggaaaatgatgtgcgtcatttgtatgtgatggacgaggtggaactgtttttgcagaataggccgctgatgagatatgctttcgatcatggattcgcttacccaaatccagaagatcctgctctctgctttgatcagtgggggatcggatggaatatggtgagcgacgggcagcttccggtttccagtcccctgatggactgggatggattggacaaggtacaggcaccggatccgaatagaaaagagaacttttatgtggtagataccaacattcaggggtacatagacaggaatctcgctgttgacgtggcacaatatttcggcccctttgagaagggatatctcatacggggctttgaggattttatgatggacatgtacgaggagacggagaaggtagagatccttttagacaggattacccagtatcgtgtggaaatggcagaggagatctgtcagagaggagttacctatgggcatagcggggatgattttggcacccagggagggcccattatgtcgctggctctgtggaggaaactttttaaaccccgtctggaacaaatctggagtgtgtataaaaggcatggactcccggtggtacaccacagctgcggggactgtgaacaatttctggatgaaatgattgagattggactggatgctatccatccagttcaggccgcagctatggatatccgtgaactgtccgggcgttacggaagccgtcttgtgttttacggggggtttgacacccaggatatactcacatttggaacaccagaacaggtgagagccaatgtgaaggagacgattgaaactctgggccaatatggaaggatgttctgcgcacccattaatattatgagaaatgtgcctctggagaacttcgaggcgctggtggaaagcgtacatcaatatagatatgcagagaactaagggaaagcaaaaggaggaaaaaacatgagaagaatgttagctattttgttggcagcagtattagctatggcaggtcttagcggatgcggagacaaaaaggaaacagggacagcggagacgtcggggggaagtgagagcggggagaaaaaggatgcttcggattttaaggtaggtttatccatgaatgtgctggtacatccctcctatatcacaatggaagccgagatccgaaaaggatgtgaagatcttggatatgaatatgtgtgtaccgatgcccaggaaagcctggataagcaaatttcagatattgaggatctggcggcccagggatgcgatgtgatttttgtaaacacttacgatccagatgttctgacaccggttataaataatgttgccgcccagggaatccgcgtgatcgctgtggacaatgcgctgagcgatgaggcgcagctggccactaccatccaggcagacaatcaccagaatggagtactggtaggcaactatgtggctgatactctgaaaggccaggatataaagattgtctgtatcagcggcgcaaagggtgcagaagtatcacgtgtccgccgttccagctttattgagggcatcgtggaagaacagctgagacagggaagcgatgccaaggtggagatcgtagcacaggcatataccgagtggtttgcagatgcaactgtgacagcaatggaagatattatggctctgaatgaagagtttaacgtagtatttgccgaggcggatgttatggccattgagtgttataagatcctgcaggatgctgggctgttggataaggttatgatagtggcagacgccgacgggcagaaagaggcttttgaactgattaaggaagggggagcctataaggccaccggactgaactccatgacgcttctgggacagacagcagtggagacagcccagaaaattcagcagggcgaaacttccttcccttacagaacctatacgccgagtgcatgcgtaaccatagacaatgtagacgagtactacgaccctgattcagcattctaagaaacagaacagactgggtgcggcggggaggcctctccgccgtgcgggtaagagaaggagatgggggtatgaaaaaaccatacgcagttgagatggagaagatcaccaagacctttggcggagtccatgcgctaaaggaggtatcttttcaaattgtaaagggaaccattcatgcgctggtaggtgaaaatggggctggaaaatctaccttgatgaaaatattgtccggtgcatataccaaagacagcggaaagattctcatagagggaaaagagatttcggaaggcagcactttggaaatgaaaaaggcaggcgtgggaattatctatcaggaatttgcccttgccccggatcttacggtggcggaaaatatctttattaaccgtatgaacctgggaaaaggctttatatcctggaaggaactgaaccataaggcgggagaaatcattgataagataggatttcagattgaaccttgtcagaaagtagaggaattgagtgtagcctttcagcagattgtagagattgccaaagctctgggggaggatgcccgcgtcctggtgttggatgagcctaccgccgtattatcgccctatgagacggaaaagctatttcaggttttgaggcatctgagagagcagggaaccagtattgtatatatttctcaccggcttgatgaagtatttcagctgtccgatgagattacggtactccgggacggagaggtggtcagccataaccgcacggaggaaacgtcaatggacaagattgtctctgatatgctggggcgaagcgtacagtccctgtatccggaaaagacagcggctggagatgagacagtgctggaggtgaaagacctgaacctgggcaatatggtacggggtgtaagctttgcactgcacgagggagagatatttggaattgcggggttggtgggcagcggaaaaacggagacagcccgggccattttcggagcagacaagggtgcacggggagagattgtgttaaagggtaagaaaatacgtccggcatctccttatgaaggagttaaaaacggaattacctacttatccgagagcagaaaagaggacggggttctgctggatatgaaaatacgggagaatgttaccatggcatccatgaaaaaggtgagtaaatgcatggtatttcatataaaaaaagaaaagaagtatgtggaggaaatgattcgcaggctctctatcaaatctaacggttcggaaactcttacaggggatctgtcagggggcaaccagcagaaggtatcccttgctaagtggctcagcgtggacagcgatgtactgattctcgacgaacccacccgcggggtggacattggagcaaaaatggagatttatggaattattcatgaattagccaggcagggaaaatcaatcattattgcctcctcagaaatggaagagatctgcggtctgtgccatcgggtgctggtgatgcacaaaggtctggctaagggtattctggaacaggaagaactcaccaaacacaatattattcactgttctgtagacaatcgttcggaacaatcccctaaagcaggaggtatataagacatggaaaagacaggaaagcacaaaattactgtgagtgagttttttgaaaaatggaataccgttatcgtgttttgtgttattgtaatgatagcttcactattaacaacaaactttatgcaggtgcagaacctgaccaatcttctgaagcagaatgcagggatcgggattattgcaatgggaatgcttctggttatacttactggagggattgatctctccgtgggctccattgtgggtgtgggaaatgttatctttgcgtatatgatgcagacacacggtctgggatattccattggagtaaccctgctggtgggagcggcctgcggggcaatctcgggatacttcgtggcataccggaatctgcagccttttgtagttacgctgtctgttatgacggtggccagaggctatgcctacataatctgcaagggggcatctatctccattaagcacccggacttcttggctttcggatatggtacgtttttgggaattcccaagcagacatatctcatgattattatctttctgcttatttggtttgttctgcggtatacgacttatggacgtatagtaactgccattggaagcaatgaggaagctgtgcgcttatcaggtatccgcagcaggatctataagttttctgtgtatgtggtatccgggttatttgcggcgacagcggctatattaaattcttcaaggacgggagtcggttctccccttaccggagacggctttgagctggatgcaatagccattacggtaatcggcggtgtcagtctgaacggcgggaaaggtactgccggaagagtactgatcggcgtctttgtgattggcatgattggcaatattatgaacctgacaaaagtatctgcttatacacagcaggtagtaaagggcctgatcattttgtgtgcggtatttatgcagacgcttcagaaaaagtccagagcataggtctagagaggatggaaaagatggaaaaagagagaaggatacctgctgttatgaaggcattggtggcatatggaaaggatgactatcgtctggagatcgagtaccccaccccggaatgcggaccggatgacattataattaagacagaggcctgcggtatctgtgctggagatctcaaatgcagccatggagctgctatgttttggggggatgagatgcagccgccctgggtaaaacctccctttattcctggtcatgagttttttggacatattgtggagttgggagaaaatgttaaggactttgtgctgggggaacggctgatcgcagatcagatcgtaccctgcggagcgtgcaggttctgcagggacggacattactggatgtgccagcctcataatatctttgggtttcagggatgcaacaatggcggaatggctgaatatgtgagatatcccaagactgctgtactatcccggctaccggaggaaatgggggtggaggaggcacttttaattgaaccctatggatgttccaaacatgcagtagaccggggacaggtgacgaatgaagatatcctggtgatctcaggtgcgggaaccctgggactggggatggttacttatgccagaaggaagaatcctaagaaactgatagttttggacatgaaagaagaaaggctccagaaggccatggaattcggggctgacatggtgtggaatccgggtacctgtaatgtcgtaaaaaacatcatggaactgacggatggatacggatgtgatgtctatatagaagctaccggccacccctccagcgttatccagggcctgaatatggtgagaaagctgggacgctttgtagaattcagtgtattcggagcccccacaacagtagactggtctgtcattggagatcggaaggaactggatattttaggatcccatctaagtccctactgctatcctttcgtcatagaaaatattataagtaaaaatctgaaaacagaaggagttgtctccgccatgttccccattgaggaatgggaaaaagcatttgagtatgccacaggaaaatatggggatctgaaggtggcaattgactttagataacagtgcggaaagcatgggttaaatgataggaaaaagccttccgggacgcagaagctccccgaaaggcttttttatgtgtccgaaataactgcaggttaagattttttcataatagttaacgaaggctcagtagtacattcccataacttctgctattctataagcagcaaaggtcaatgcagagattatattacaggaggaaacccatggagttaggaaaggtaatcaggacattcagaaaagagaaacagctaacacaggaggaaatggcgaggcgtctgggtgttacgcccccggcagttaataaatgggagaacggcaactcttatccggatattaccctgctggctcccattgcccgcctgcttggaattacaacggatacactcttgtcttatcgtaaggagttgacagaccaggaaatccaggagatactcacccgggtgggtgcgcgtatgaaaagggaggagtacagtgaggtgttccaatgggctatgggtgtgattcaggaataccccggctgtgaagcgctgatcctgccggttgcccaggttttggacgcatacagagacattctccaggtaccggaggcagagaagtatgatgaggaaatctgcagtctttaccgtcggatgctgaacagtacagattctgctgctgtccatacggccttaactgctctttttctgatagccctcaaaaaggagcagtatgaactggcagaacagtacctggacaagatcccccagcagagagtggaccctatgagatacagggcattgctgtacgcgaaacaggaaaagaatgatctggcatatgaattgtatgagcggatgctatttcagggatacagcgatctcacctggtgcctgcaggggatcagtgccctggcaataaaagagaatcatatggataaggcagaacggattgcccaaaagcagaaaaaacttgcggaaatactggagatgggaaagtacatggaggcttccccggaattctcactggcatatatgaggaaggacaaagaagcctgtctgtacctgctggaagagatgaccgacggtctgggagatatggcgccctacaggaaatcagacttgtacagccacttgcagtatgcgaaacgcggaagcgagaatacggcgtttatgatgctaaaggcactggaggaagatgaaaacctggacttcctcagaggggaagaaaggtttgagaggattttggagaacctacgagtggtattcttttaaaaatctcttcagagcatcttcccagtggggcagaaggccgaaaccgttatcagtcagacaggacttatccaggcggctgtttttgggccgtcttgcctttgcaccgtattcttctgtggttagaggatgaacggtgatatctatatgagattcggctaagatccggcaggcaaactcgtaccaggagcagcagccctcattggtaatatggtaggtgccgtatgcctctgtctgaatcatatcaaccattaattttgcagcatccggggtataggtaggagaaccgatttgatcggcaactacagagactggctgaccggtgtttgcccgccttattatggctttgacaaaattatttccgttgattccaaatacccaggatatccggacaataaaatatttttccagctgcttctccaccgccagctctcccaggtatttactctttccgtatgcgcattgggggtttctattatcatctggtttccaggggcgatctcccacaccttcgaatacgtaatcggagcttacaaacataaatttgcagcctgtttttttgcaggcagttatcagattctgtgtcccggttacgttgaccatatggcacagttctgtttcctcctcggctttgtctaccgcagtatagccggcacagtgaatcacagcatccggccggatatcctcaaccgtgtgaagtacagcagagaggtctgtaatatcacagtctttcgacccaaggcccactgcagggatttctctgcttcttaactcttttataatatcatatcccaattgtccggtagcaccggtaactaatactttcatacgctgcctccttttattcgatgttatattctctgaaaaaagtgtagatgcaaacccttgtacaatgagagaagtcatccgggtttcttataatgatactgtaagtttctcctttttccaagaaaattattgtaaatagatattgttaaccaataataaaaactggttgacaattcgcgagccattcgatatgatattttgtgtgcaaaatataattacagaaaaagaggaggaaagaacttgaagagaacactgacagcgatggaaatggtatatgcagggctttttacagcgcttatagctattggggcgtttatacaggtgccggtgccgggaatggattattttacccttcagtttttatttgtactcatggcaggaatggtgttgggcagcagactgggcgcagtgagcgtgggagtctatgtgcttttgggcttgcttgggctgcctgtatttgccgcgggcgggggattcggatacattttccggccgagtttcgggtatctaatcggatttatcgcagctgcctttgctgcgggatttgtgactgagaaattaagggcaaactcctataaaaagtatctttgggctgcctttgcaggatttgcagttacttactccattggcttggtgtataaatatctgatgctgaatctgtatgtgggagaaaaaacagcgtttgcaatggtgctggcggactgttttcctctggatatgcccggagatgtagtgctgtgcctggtgtcggcaatgattgcggtacgcctggtgcctgccgccagggggatggccctgaaggcagccggtgggattaaggaggatgtatcggttatatacggaaaaggaagggagaatcaatgaatacaaaactgcaggaactgaaaaacagggtgctgaagggggagtccttgggcaaagaggaggctctttcccttgcagagatgcctttagaggagctctgcagcgctgctgatgagatacgcagagctttctgcggcagccgttttgatctttgtacgattgtaaacggaaaaaatggggcatgtacggaaaactgcaaatactgtgcccaatcgtcctattacaatacaaagatccaggggtatcccctgctctccggggaaaagctggtggagcaggcacagtacaatgccgcccggggggttcccagatattctattgttacctccggaaagagactaaacagccgtgaagtggaacaggcttgtgacagcatacgagacatcagaaagcagacagacgtggccgtctgtgtatcctttggacttctggacgaggaggcattccgtaaaataaaaggggctggtgctgtgcgtgtacataataatctggagtcctcacgcaattatttccccaatgtctgtaccacacacacctatgatgaaaaaattgccacactgaaggcggcccaggccgccggtctgagtgtgtgcagcggagggattatgggactgggagagtctatggaggataggatcgatcttgcgctgacagtccgtgaactgggggtaagatccatacctgtaaatatgctgaatccgattccggggactccatatgagaaaaataagagactgacgactgaggaaatgtgccggattgtggcggtttaccggttcctggtgcccgacgcctttatccgcctggcaggaggccgggggcttatgccggataaagggaaaagatgcttccggtccggggcgaatgcggcaattacgggagacatgctgactaccggcggaattaccatagaacgggataaaaggatgctggaggaattggggtatgaggtggtgagaggctgtgagtaaaggtctgtttgtgacaggcactggcacagatgtgggaaagacttatgtcacggctctgctggtaaaaaaactctgtgggagcggagtgcgtgcggggtattataaagctgcggtgagcggaaatgaaaaaggccccggaggactgataccgggtgatggggagtatgtaagagagatctcccaaaatggccagtcactggcatccatggtcccctacgtctaccgatgggctgtctctccccatctggcggcaaagctggaggggaatcctgtagaaccggaaagggtagcggcgggataccgcagactttcccgggagtatgatttcatcacgatggaaggcagcggaggaattgtctgccccatcagatttgatgaaaaggttttatggctggaggacattatcagacaattgaagcttccgagcctgatcgtggcggacgccggactgggaagcatcaattctgcagtgcttacggcggaatatatgaagcaaaaaaaactgccggtgcagggatttattctgaatcattatcacgacgaaagtattatggagagggataatcggtatatgatagaacagaggacagggcttccggtgattgaatgtatcgccgaggggcagagggagcttgaaacagaggcagaggtgtgggaaaaaatgtacgcctgagcaaaatactgtctgtaaaaaacgggttttgagatttggttgttgaaccatccacaaaaagagtgccgcggcccatacaaccatggagccggcggcactcttgttctatttttgttccagcatccagagatgccggtctcttcggaaaatcaggcaggttcctgttcccaggatcccaagaagcagaaataaaactgctgcaccagaccctttcccgctgccaaagagaaggtgaagaatgtgtccctggcacagaccttccatgaggggttcaaacaccttatccaccagcagccctcccagaagatatcctaccggtatggtaaaaaactggagggtatttcgtacagaatacacccgtccctgcatctctaaagggatgtgggatcggaagagcacatccatattggcactcatcacaggaataaacagccatcccagaactgccccggtgcaccatacgggaaggttctgtccaaaagccagaagaaagttttctgtgctcatggaaaagagaagggaattgcagatcgcccttacccggcttttgggagccggacagagggagacggctgcacttcccgccagattggccaggcctgtgcaggcatttacaagacccaatgcagtgcggccgccgccttcccttgataacagcatagcgggcagagcggcgttatacatagaggccgtcagattaattgcagccaggaatactatcatatccaggattccccggttttttttgaggtatccgatcccctcccgggcagagctcaggatggaggccttccccgcggcaatacttccgggaaccggaggaatccggataaggaaagccagagttagaaaggcaattccaaaggtaataaagtcaatcactattacagcggttaagctgtaaagagagagaattgccgtggcgatcacaggtgtcaggactgtaaccagggaattagagaaggaacgcatgccccctaccctctggtactgctctttgggtgtcagaagactgactgccacatctgaggccggctgctgaagtgtattcataagcccgttaaaggcgttaaggacatacagatgccagatttcaagatgacccgtccgcagcaggaggaacactgccagggtgcttgccgcagcaagactgtcacacagcagcatggtatgttttttgttccacttgtcactcaaagccccggcaaatatacttagcacaacatagggggcataggtacagacggacaggagggctgttgtcagtgcagacccttttgcctggtaagaccatatgaccaaggcatagcttgtcataccgcttccaagggaagaaagtgcctgggtagaccagagaagaagaaaggaatgcaatccctgaaacatgtatttaattttattcataatgactttgctccttataattactataatttataatacaaagtgcaaagtccaaaacggacgaatagatttaactcgtctccatgcaaatccgtccgctgttcagactttgcatggagggcaaacaatacagagcttcattttccggaatcctcccttcggttatctttctataaagttaccatggaaaacaccatttgtccaaggatttttgtgcagaccattgacagggtaccatataggacaggtataatagagaggcagagataaaaacacagcccggtaggtagtccgggcgcagcggcggatattcataaaagcgctgtcagtaaccttcctccttaggtcgtccgttctttgccgtgattttttatatttaaggaggacttatcatggacaaagtatcggtaaccttggaggttttttttgaagatcccttctgggtagggattgtggaaagagtaacagacggcatgctggatgcagcgaaggttacattcgggccggagccaaaagaatggcaggtatgggacttttttctgaaaaactacgggaagctgcgatttagtccggctgtcgcggcctgtgtaaaggaaaagagcgcaaaccccaagcgtaagcagcgggaggcaaaaaagcagctggaacatgcggggatgggaaccaggtcccagcaggccttgaaattacagcaggagcagtcgaagaccgagcgcagagttcggagcagactgcaaagggaagaagaacagcagcgcagatttgagctgcggcagcagaagaaaagagaaaagcatagaggcagatagtactgcctcttttgctgttaagggggaaaaagtggagacatttattcggttagagaaagcagcaaaagaatacggcaaaagcaggattctggaagatataaacctggatatcagaagcggtgaggctgtagtgttcacaggcaccaatggagtcgggaaaagtacgattctgaaaatgatcggcggattgatcgcgccgtcagggggaaagatacataggaaaaaaggactgctgtaccatatggtaccggaacgatttccaaagtctaatctgactgcacggcagtatatctgtgcagtgggaaaaattgagggcctaaggagagaggagatccagaaaaaaagtgcggatctttttgaacggtttcacatgagcgggatggaagataaacccatgaaactgctgtctaagggtacgcttcagaaagtcggggttatccaggcggttctgaaaagaccggatattctgctgttggatgaaccgttgtccggacaggatgcggcatcccaggctgtatttgtggagctggtcaatgctctgaagagggaggggactgccctgatcatttcctgtcatgaggaatttttggtgaacgctgtgggggatacagtgtgcaggatagagggaggaaagatgcatacagtccggttagaacgcgggaagcagaagaggaaggctctaattacctttgaagcccctggggacaggactgcgcctgaactgcctgtgacaggggaagcaataccggggggactgcgttttatttcttcctatgaaagcagcaatgaggtggtggcgaagatgatacgggaagggtttcgcttggaggattttactcttgtgggggaagaaccggttctggcaggggagagagagggaaacggaggaactctccaggagcttgagctgcgggagaacgaaatggaaaagcaaagaggctctgtatggggaatgctctcctatgaatttcggacgtattttaagaccaacagatttgccatgccttttttagttctgatggtatttcttttcagcttatattcttccatgcctgtgggtgtgacagacagctttaccatctcctgtaatcttttgtttttactgatgacgtgggcagggttatcatacaatgaaatgcagcaagcggcagaagaacagatgatgatactgcgtcttcaaagtgaaacgatatattatttcggtcaaagcctgtttctctgccttctggggggaatattcacgttggtttctctcttgatccccctggtgttggatgcagtaaacggcggccaactgttttcaatgggaattctgcttcaggacgcagcaggaggtttactgttcatgtgggcgggagcgtttctggggagttctcttgggaccttgctgcaccccagagtgatgaaagacagaaaagcagctgtagtgcttaccgtgctgattgctgtcttagccataggtaagacagcaatcctgcaggatgcatcctgggtgggatgggttttatatcttttgcctcctatctcagatgttacaggagtctttgccgggactttgcattttaccttgaaagataccgcctttgccgcgggaatgtgcatcctgtacggaggtatcttgacagcggtgagaatctggggcctggaaaagaggaaattttagcagtcctgcatggagagaagaatttccttcatcgctatagccgcgatgcttaaggggcgttctctgtcttgtatcagacagatatgcctggcagggggctcgcagtataggggaatgtggaaaatttccttgtgcgcaagggcctcatctgccagatccaggggcagaaaacctattccaagatcattttttatcataagaagcacctgatctgtagttgcagcttccatatccggctcaaggggcagatgttcctccataaagtattggttgtagaattcataggttttgcttttagcatccatgcaaataaaagagtgttccttcagatctcttaaatgccatgtttgagctgcaagatatgcgtagcccggaccacctgcaagaatttcctgaaaggccttcaggggagtttcctcaagaggctttgatactccagtgggagttgtgactactgaaaaatccaccagaccgctttgcagggcggctatggcctgaggcgtggtatgattggagatacggattcgtattccagggtgcctgctgtgaaattctctcagttttttcagcagcagtccatggagggcgatctcactggcgcctatggtcaccagaccgctgtggagagacttacttttcagaagttcctcctctcctgccaggagctgggtgacagctgccgcaacacggggatataactgttctccctccggggtcagagtgacgccccggctggagcgtataaaaaggcggcatcccagctggtgctccagattatgaatggagcgggtaacattgggctgattattcatcagtatattggctgccttagtaaagcttttgtatttggctacataataaaaaatccggtaatactcgtaggaaatattcatattgcctcctgtattatataaaaatgatatagatgttatctgaaatatacattttacatctggttggagaaaagtataatatgatagaaaaagaaaagcaagagacagttgctgagatgacaaaggcaggaaggctccgggagaagggcagttcctgccggttttatgtatatgatggcagcttctcgataaggaaaggagaaaaggaatatggtgaagattaaagcaaggagccagatgtcagagtctcttctgctggcggtgttcttaactctggcgggagggtttcaggatgcctattcttataactgcagaggagaagtctttgcaaatgcccagacgggtaatattgtacttctgggacagaatctggcccagggcagctggcaggaagccctgcattatatccttcccctgggggcgtttatctctggtgtctatgtgacggagtgggtccaccacttgtttaaggaatatcagcgccttcactggcggcagatggttctttgcacggaagcaatccttctggccgttgtggggctgcttcctcagtctgcgaacatgttagccaacggtctgatgtcttttgcctgtgctatgcaggtaaacagcttccgcaaattcagaggtatcccatgcgccacaacaatgtgcatcggaaatatgagaagtgccacagagatgctttgcaggtaccatataacaaaggacagagagctgagaaggagatgtatgcactactactttgtgattctggtgtttgcattgggggcagctgcgggcgctcttatgagtttgtggctgggggaacgcgctatctggatggcaggaggacttttattggggggatttttgataatgtttgtgagagaaggggagaggtaacggtgagagaaatcccgcggaggagcctaggagggcattcctgcaaaaaaaacaggagatcatagaaaaggccgccgctgcgggataggggtagatactgtggatgtggaagcggcaaccaggagaaaaattgcagtctgcaatgttccggatcactgtatctatgaggttgcaagtcatgcgtttgccttcataatgtgtctgaaacgccagctgtggccttttgtaaagagggcccgtgagggtggctatgcccagggaacacagattcggtgtaccagaatccgcggtgaggtaatgggtatgaaggttcttgtttacgatctctttgtaacagagagcggcagggcagagatacagatgaccgacaatctgggatgcttgcaggagagggcagacgtttctgaaaacactgtaaaattaacctgggaagcacagaggtatggaattatttacctctgtgcttcctttttcaaataaccatttgacgattggaaattctgtactataatagaattatattaagaaattcttaagggcgttggtacttacttaacaagacacaagtgcatatgaaggagacacaaatgattaagaaatttgcagtggtgttggctgctattttatgctgcaatattctgggctgcggcagccgggaagagggggagaaagggactgcagcgactgcggcagaggacagtggggtgaacacagaacaaaaagatgagataaccattcagggtaaccgaagcagtgcgtcggttattccggatcccgtctggaacacagtagattacagcgggtattttcagggagtgcagggatgtgcggtggtatttgactccaaagaagacgaatatcaggtctacaatgaggacatgtgttacacgcagttttccccctgttcaacatttaagatcgtatccactctgattggattggaaacgggtattctcacagggccggattctactatgggatacgacaatactaattatccggtaaaagcgtggaataaagatctgactctgaaagaggcattccaaagctcctgcatctggtatttcagaaaggttctggatcaggcaggggcggatgaggttcagcgccagctgaatgaactggtgtatggaaactgtgatatctcccagtgggaggggagcggtgtcaacccgcagcctcagctgaatggattctggctggagtcctcgctgctgatatcgcctatggagcaggttaatatgatgtcagatattatggagggacggtcagagtatgtctccggggaaacggagattctgaaggagttgatgttcgtccaggagacagatgggcataaaatatacggaaagacaggaagcggaaatgcaggagacggctggtttgtaggctttcaggaatatcagggtaagtattattattttgcattttatgtgcgggatgagaatgccgggggcgacggggataaagcagaggaaattggaataaatgttctaacagagaaccagcagacacagtaaattttccccaatcatttgacaaatgcttttatgtgaaacaatgggcaaaatgatgatgcaagctcggacaaaggggtctgatagagagcccttttggccgggcttttttggaggtaagtatatgagatgtgtaccggcaggggattgtgctattatggcagaatttccacaggagattagcacccggacaaatgacagggttcatgggctggccagggagatcgtaagccggcagatcccgggaattacagaattggtgccagcattctgttccctgatgatttattatcagcctcaggtgatttcttatggggaactgaaaaagaggattgaggagctggaggaaggggaagtgggaacgttcggcaaaaaaaagaggattctgaagattccctgctgctatggggcacgctttggctgtgatcttgcagacatggagcagtatatgaagctcaccagggatgagattattgccattcacagctctgtggattataaaatctatatgctgggatttctgccggggtttgtctatctgggaggactggacaaaaggctggagatgcccaggcttaagataccccggattaagattcagccgggagctgttggaataggaggaaatcagactggtgtctaccccctggcatccccggggggatggcggctcctgggaggcacgcccgtggacttttataatccggaccgggaggagccggttctgtgcagcgccggagaatatatccgttttattcccataacgatagatgactactacgatatccgccggatgatccaaaaggggagctataaggtggtgactgaggaagaggagggagagcgcttatgccagtaaagattcttatcccggggccgctgacgacggtccaggacggagggcggtacggccgtcagagtgcaggaatccccccagcgggggccatggatcaggaagcctgggagactggaaattatctggtgggcaacgaacagggggaggcaggccttgaattcaccctgtggggagggcgtacacagttcacagaggataccgtatttgccctgacaggggcagacatgtgccccaggctggacggtcagagggttgctatgaatgtgccccatctggcaccgggaggagctgtgctgcatatggatatggcaaaggcgggatgccgtacatatctggctgcagcaggcggtattgaggtacctgctgtcatggggagccgctctacctatctaaaatgcagtatgggaggatataagggccgtgcgctgaaggcaggagacattctggaagtaggaacagtccgaaaaaattttgaagaagtaaaaaacaggaagatccggcagcggatgtttccccgggagatcgtacttcgtgcggtagaggggcctcaggcgctttactttacggataaggggaaacggacgttttatgacagcgcatataccatatcgggggaaagtgaccgaatggggtaccggctgagcggccaggccgttgagagcaaaaacggaacagacattatctcggatcctatccccctgggcgcagtccaggtccctgcacagggccagccgattgtcctgctggcagatcgccagacaaccggaggctatgccaagattgcggtggtgtgttcttttgacatacccaggattgcccagggaaggccgggagatctggtgagatttcttccggtttccatcgaagaggcacagatgctgttaaaacagtatcgcaaagagttagaccttatgatgaaaaaatagaagggcgggaaatgtaatgtatcagatagacttgaattgtgatttgggagagagctttggaaattatcgctgcggtctggatgaggaagtgattccctatatctcatcggctaatgtcgcatgcggctttcatgcctcagatccctcagttatggctaagacagcagctttggccaggaagtatggggtaaacgtgggagcacatccaggtttcccggatctgatgggattcggcagaagaaatatgatggtgtcccgggaagaagcgaagactatggtccagtatcagataggagccctaagtgctttctgcagggtccagggaattccaatgacacatgtaaagccccacggggccttgtataatatggcgggtaaggatgcctccctggcagaggctatatgcaccgggattatggaagtggacagcagactcattctcctgggacagggagggagtgagatggagcgggcggcggcggccgcaggtctgacatttgccagagaagtgtttgcggatcgtgcctatgaggaagatggaacgctggtaccgagaactaagccgggggctgtaattgcagatgaagaggaggctgttcgaagggtactgtcaatggtgaagcatggaaagacagaggccgtatccggaaaggagataccggtgaaagcggattccatatgcgttcatggagacggggagaaggccctggcgtttgtaaaaaaaatcagaatggaactggaaagggaggggattcagattgttccccttggctccacagcaggctgacagaaagatagaaaaggagatccttgaggatctccgcagagcagacgggtgtgacgcctgatcagtcagacggcagggaggagtatatattttttactgtgcgaaggacaaagtgggtttttgtctggcggattccgcctaggtcattgacccaccggtgtactttctccagctcctcagaagaacggcaggatatcttcaggagaaaatcgaattccccggtgagataatagcaggaaataatcttcgggttccccgcaaccccttccatgaaggattcattatatctgggatggtccagacttacttccatgagtgctgtcacaccattgcccaccttgctgtcgtctgtgatggcagtataagaagtgataattcccatatcctccatccggtgaatccggtcaataactgtagaaatcgataaatgtacttctttactgatatcagaggccttctgcctggcattggcctttagcatctctaaaattttataatccagttcatccataagaagcccatcctttccaacgagatctgccataactgcaggttttatctattttagtataacatctgcagcaccagaaatccataagaaatatacccctgtaaaaaggccggaaccagacttgcgcttggggatgaaatagctgcggctgaattttgggaccgggattttcaacgcccaatagaaaaagtaaggctgtaaatcataaatttccttgcacctcaggacgattcactctataatagtaattcgcaggtaaagataaggcagagaggtctgtcttatcttttgtgcgcatgtggaaaaaaggagtagagcatatgcagggatatcagctaaagataataattaagaacagcaagccgcctatctggagaaggacggcagttcccggggacatcacctttgggcagctgcaccgtgtgatacaggcagtgtacggctggaaggacagtaaaccttatatatttgagattcctcagaaaaagataaaaataggtccggcagaggaccaggcaattgccccctggcttcagaaccataaatggatccgctatacatatggttcggagaacccgtgggaacacagagtggaaatagaaaaggaagtagatgatgcctggggatatcccagggtggaaaagtataaaggggcaaacctgccggaagactgcggggggattgctgggtactatgaactgcaggaaaagggaatggcaggggaagaggagtattccctggagacgataaatcagtacctggccgaacacctggattttcataagaacagcgggacttctgaggatactggtgagtataccatggagcggtggctgatggaagctcatcctgaggaactggaagagcttgcagaattgaatcatctggcatcttataaaaacctgacaaaggaagaattgacagtacggctgaaagagcttttgcttaacgaggcccatatgtcccagcttctgctctatgcaggagcagacgagtacagagtattcctggagcttacggcaggcggccgcgggggacgggcggatttgaattttgtataccgctcacgccttcttagaagctgctgcattcttacaagggatactactctggtggtgcctgaggaggtgaaggctctctgccggaagattatcactccggaatttgaggcggaacatgaagagatagaaactttgagaaaatactgcagcagtgcctgctatctgtatggggtaactcctgtttctcttctgacaaaattatacaatcaatatgaaggaacccggcttacggaagaaataatggaaaaccggtgcagggaactgatgaataacggggggccggtcacagtaatcaatgattctattgtggcaaatgaactgctggagcaggatgcctaccggatgcttttgctgcttcagggaacaaaaccctactatatcccaccggttcggggactcttcctgcagtacggcgtactctacggggaagccccggatcaaaacggactggaacttatccggtatgtgagggaggatctggatgccggacaggcccaggcaaacagctatttttacgaagcccaggcactgatacataaaaattatgaaatggaagatctcattgcagcggccgccaagtataatattacccccggcacaaaggaacagctggctggtctgtcagaaagactccgcagtgtctggaaccataccaggcgtctgggggatcggggatacacccctctggaactggagatacttcagaaaaaagcagggctttcgtccggagccggcaagccggggccggtacagaagtgccagaaaatctatcccaacgacccatgcccctgcgggagcggcaggaaatataaaaagtgctgcggcaggtagctgccactattatattttatatttgaaaaatcttgtctttttccttataatagagaagttaggactaagtaatatagaaagttggaagagccatgagccattcaagtacacagccctttgtaaaatgggcaggggggaaaagacaattattagaaaaattaagatcacggatgccgtctgcctgcaaaaagtactacgaaccatttgtaggaggaggggcgctgctctttgacagcaagccggaacaggcatttatcaatgacatcaaccgtgaactgatgcatacctacgaggcgatccgggactccagggatgaattcatcagccggatggaagagatggatcgtgtcacctgtaccaaggagttttattacaagaccagaggacgctacaatgaaaagctttccggcggtgagtatgatgtagagatggcagtactgtttgtgtatctgaataagcactgctttaatgggctgtaccgggtgaatgcaaaggggttgtttaacgtaccctggaatcagaagatatcgggcaaatccattgatatagaaaatataaaagcggtttcttattatctgcagaacgtgaccattacttgccaggattttgagacagcactggaaggggcaggggctcaggattttatttatctggacagtccctatgcgccgctgaatcccacctcgtttgaagcgtataccaaggaaggatttacgattgaagagcacaggcgtctggcggaagtcttccgcagactcacggaaaaaggctgttactgtatgctgaccaatcacaatacggagttaattcatgaattatacgacggtttttccatggaagagatcgatgtgaggagggccattaattccaatgccagcaaacgggtaggcaaggaattgattatacgtaattatcggtaaagcagacagggagcaaataacgattcaccgggcaggcttggacgtgtccggacagagaaggagagtggggatggacaaactgtttcgctccagtttaaaaccagtttatacagaagaacatataatgctgtaccaggcagacagtctggaactgctgaaaaagggaataccagagtctgtggatatgatttttgcagatcccccctattttctcagcaatgacggaattacctgcaagggcggtaaaatggtatctgtgaataaagggaaatgggatcagtgtgattctgttatggacaaacacaattttaaccgcagatggattcgggcctgcaaaaaaatgctgaaggaaagcgggagtatctggatatccgggactcttcacaatatttattccatcggcatggcgctggagcaggagggatttaaaattatcaataatattacctggcagaaaacgaacccgccgccgaatctggcatgccggtgcttcacccactctacggagaccattctctgggcgcagaagaacgaaaaaaaggcccggcatctctttaattatgaagatatgaaggaaatgaacgggggaaagcagatgaaggatgtctggacggggagcctgacgaagccctctgagaagacatttggaaaacatccgacccagaaaccggagtatctgctggaacgcataatacttgcctcaaccaaaccgggagatatggtattggatcccttctgcggttccggaactaccggtgtggcggccaagcgtctgggccgcaggtttatcggcctggaacgggaggaagagtatctgagaatcagcgaaaagcgtctttgggcagccagggagaggcaggaggatagccatgagtaaaaaaattacagtctggttactggtgctgagtatgttctgtctgctggccgggtgtcaggggaaggaagaggagaccagagaatatataaataaggggaatacattttctgtcacagtcccaggtgaatggaagattacagagacagataatgaggaccatctggtgctggacaacgaggatcagtctctgagtatcctgattcagcggtttccccaggaagggctggaggaggaagacggcagcggactggaagactttatggctgcgtataaaagccaggttatcccggatctggcggccgccgggtcagagtcggacggggatgcacagctggagggaatgaagcatgccagagaagaggaatataagatgacccaatcaggccaagtcttcaaggcttatatcttatatgtggaatccgatgtggcatattacagtgtagcagtcacaggaaccggggaatcctacgatccggatattgataagctgaaaacagcagtaaaaacactgaaggagttgtaactaccgggttgacttacaagtaaaaagtgatataatgatcccagaatataagaaaagctatgaaggaaagagtaacttataggatgcatacagagagagcggcacatcggtggaagctgcttatgcaaaatatcagtgaagaccactcctggatgttctgcaggatgcagaagatcagctgcatatgaatacagaagctttctgttaagtatggccgtatgcctgcgttaaaggctaggatttgatggaatccgaaagttaaaagttaaggtggaaccgtgcatttcaaaatagtatgcacccttagagctgtacaattgtgcagttttaagggtgcttttcttatatccgcaacatgtcattctgcgcagaggacagttgaaaataaaagaacaggagagagtatattatgaggataacattaaaagatggaactgtgaaagtatatgagaggccgctgacacttgaagaattggccggggacctttcagagaggctgagacaacatgcagcggcagggcttgtagacggaacactgacggatctgagggaagagctgacggcagattgcagcgtggaaatcctgacgtttcaggatgagagaggcagggacgtcttccgccataccaccgcacatattctggcgcaggcagtgaaacggctgtatccggagacaaagctggccatagggcctgccatcgcggacggcttttattatgattttgacagagaagtccccttttcccaggaagagcttatgctgctggaaaaagagatgcagaggattgtaaaagaagggtataagatcacacgatttacccttaccagggaggaagcgcttcagctggcagcatcccgtggagaagactataaaaaggaactgatagaggagctgccggaggacgaacccatccgtttttatcaacagggggaatatattgacttgtgcgcaggcccccatctgctgagcgtagcaccagtaaaagcttttcatctgacaaaagtggccggagcttactggaaaggcagcgagaagaataaaatgcttaccagaatctatggcacttcctttcccaaaaaagcagacctgaaagcgtatctggaacaaatggaggaggcaaggaaaagagatcacagaaaattggggaaagaattgggcctttttacctttatggagcaagggccgggattcccattctttctgccaaagggaatgatgctgaagaatgttctgattgactattggagagacattcaccggagagaagggtatgtggagatatcaacgcctgtgatgctgaacaaaagcctctgggaaacatcgggccattgggaacactataaggaaaatatgtatactacaactattgatgacgaggagtatgccatcaaacccatgaattgtccgggaggtatgctggtctatcagtcggaacctcgttcctatcgggaccttcccatgcggatcggtgagctgggactggtacaccgtcatgagaaatcaggagctcttcacggtctgatgcgggtgcggtgctttacccaggacgatgcccatatttttatgacaaaggatcagattttgccggagataaagggagtagtccggctgattgatcaggtatattcacgattcggattcaaatatcatgtggaactttctacaaggccagaggacagcatgggcagtgatgaggactgggaggatgctaccatgggacttaaaagggccctggaggagatggaaattccctatcaggtaaatgagggggacggggctttctacgggccgaagattgactttcatctggaagactcaattggaagaacgtggcagtgcggtaccatacagttggactttcagctgcctttgcggtttcaggcagaatatacgggggaggatggacagaagcaccgtcccattatgattcacagggtagtatttggctcagtggagcggtttatagggattctcacagagcattttgcaggaaggtttcctttctggctggcaccggtgcaggtgaaggttctcccggtctcaagaaaacacggtgcgtatgccggaaatattctggagcagcttaaaaaccaggggatccgggcggacatggatatgagagatgaaaaaataggctataagatcagagaggcccagctggaaaagatcccatatatgatagttgtgggagatcgggaggaaacagacggcaccatagcactgagaagccgggaggaaggagacctgggaagtatgaagctggaggagttcctggaacgcagcctataatccgacaagaaaatccttttacttcccccgggtttatattataattaatctgtatgttaaaataaatatagggagaggtttttctatggaacgaaaagtaggaaccatctcaagaggaatccgctgcccgattatccgggaaggggatccccttggtgatattgtagtaaagagcgtactggacgcaggagagagtgaaggattttccctgagagacagggatgtaattgccgtgacagaatcagtggttgcccgttcacagggaaattatgcctcagtggaggccattgcagaggatgttaggaagaagctgggaggaaaaacgataggagtcatcttccctatcttatccagaaaccgttttgcagtatgtctgaagggaattgcaaaaggagcggaaaaggtagtccttatgctgagttatcccagtgatgaggtagggaatgaactggtatctctggacaagctggatgaggccggcgtgaatccctacagtgatgtgctgacactggaacagtacagaaagctgtttggagaaaacaagcaccctttcacgggcgttgactatgtggcgtattacagtgagattatccgtaagaccggggcgcaggtggaggtgatctttgccaacaatccaaaagagattctgtcttatgcggactgtgtcctgtgctgcgacatccactcccgggagcgtaccaaacggattctcagacaggctggggctaaggctgtgtgcggccttgatgacattctcacggcgccggtggagggcagcggctgcaatgagagatacggacttttgggatcgaataaatcaacagaagatacggtaaaactgttccccagagactgcaagaacctggtagaagagatacaggacaaggttcttaaagcaacaggcaaatgtgtggaggttatggtatatggtgacggagcttttaaggatcccgtaggaaagatctgggaactggccgacccttgtgtatccgtagcccacacacctggtcttgagggaacaccgaacgaagttaaactaaaatatctggcagacaatgatttcagggagctgtccggggaggcgctgaaggaggccatatccaagaggatcaaagaaaagggcgaaaatcttgtgggagatatggcgtctcagggaaccacgcccagacgtcttacggatctcataggttctctctgtgatttgaccagcggctccggggataagggtaccccggtaattctggtacagggttactttgacaattttacgaattaggataaggagatagattagggatgaaacaggatatgatagtaatcttagacttgggaagcacagagaataccacacttgcgagagctatccgtgacctgggggtgtacagtgagattcaccctcatgatattactgccagggagcttaaagagctggaaaatgtaaaaggcattattctgaacggcggtgaaaaccgggtggtggacggccagtccattgacgtgttgccggagatttacggctgcggctatccggttgctgccattgatcatcaggcggcacagtgtgagacaaagctggaaacactgccggatacaaactggctgaaggaatttttattcaccgtctgcagagcagagccgaactggaatatgaagaactttgtggaagaccaggtggaactggtgcgccgccaggtaggggataaaaaggtattgctggcactctccggcggggtggattcttctgtcgtggcagctcttcttctgaaagccatcggacagcagcttgtgtgtgttcatgtaaaccacgggcttatgagaaaaggagagtcagaaagcgttgtctccgtcttccgggatcagctgagcgcaaaccttgtatacgtagacgccactgagagattccttggaaagctggccggtgttgcagatcctgaggagaaaagaaaaattatcggaagtgaattcatccgtgtcttcgaagaagaggccagaaagcaagagggaattgacttcctggggcaggggactatttatccggatattatagaaagtggtacgaaaaccgcaaaaatggtgaagtcacaccacaatgtgggtggtctgccggaagatatgaaatttgagctggtagaacccctgaaacagctttttaaagacgaggtacgcgcctgcggtctggaactgggacttcctgacgccatggtttttcgccagccattccccggaccgggactgggagtgcggtgtctgggcgccatcaccagagagcgcctggaggctgtccgggaagcggatgcgattctccgggaggagtttgaaattgcaggcctgaataaaaaagtatggcagtattttaccatagttccggacttcaagtctgtgggggtaaaagacaatgccagatgctttgagtatcctgtgattatccgtgcggtgaatactgtggatgccatgacagctactatcgaacaggtagagtggcccgtgcttctgaagattacagaccgtatcctgaaggaagtggagaatgtaaacagagtctgctatgatctttcccccaagcctacggctactatagagtttgaataaatcgagttgcttaaaaaagccagtgtttatgcgggtttcagcgatttcgattagtcttttgataacaaattgataacagtcatagcaagtgccattattcttgttatccagtggtttatgggtaacggaacaattaacaggtggcttgcagactaaagttcggagcttggctctgaacaaattccatattataaactaagcccttagctgtggttaataaccatagttaagggcttttttgtcgttgccaaagcatctgtagggagctgccagtggcaggtcctgtaggtgcttatttatctttcaagtggtctttgaatgcttccacgagagcgtcacttaattcctgtgatggaacttttgcccaacgctgtgtggtgtcgaactctggataatggtaacgccagttatcgtattcttctctgttgatttcttcggaagatagcttgtctgcctgttctttccaagcatacagcattttgaggagttcatatgcttctctgcctttgtccttgttgacctttaagcatacctctccgtctgcttcactgacagtaagaccgtaaatatcttcaagggtaaacagagtgtgcataagaccgatatagctgtctatgtcaggaacatcaagagcctgtggagaaacatcaagcacctgtgccaatgcatttgtaaggtctgctttcggtttgcgtgtaccagtttcgtactgtgccaaacgcacatcagcactcttttctggaaaaccgattgctgtaccgagatacttttgtgtcataccacgcattagtctgaaaaaatgtattctttcgctgatagccataatgatacgctccttttatatttagtgaaataagtatagcagaaatgtttagtggaagtcaagaaaaaccgaaacaaaaatgtttaatattttctttgcaaccacttgacaatagcaaatatgtttagtaaaataaattacgaattaaacaaatatgcttaatgcgacaactgaatgaccgtccgaaaagccaaaccgccaagacctcgtcggagcaagttccgtatcgttcgcttgtgtgcaagcacaaaagctcattcgctgcactgctcctcctcttccccaaaagtctccgacttttcgggaacccctatacgagcgagcgcctgatgtactgcggtgcattgggacagcacagcgcctgccgacaagcaggagtgcctgttggaactttaacacggagaaagcggcaagcaaaaaattattttaagaaaggaagaaaaaggatatggaaaacagatttatccgagccgaagatgtggctcaggaactaaacgtatcaaaaccttatgcatataaactcatcagacaattaaatgaggaattgaaagcaaagggctttattacgattgcagggcgtgtaaatcgccagtatttttacgaaaggctctacggagcaggaaagggggaaatgtaaatgccggtatttaagaatgaagataacggtacttggtatgtgatggcaaggtatgtgaactggaaaggggaacgcaagcagaaatgcaagcgtggctttgctaccaaacgagaagcacaggaatgggaaagaatgttcaaattgcagacttcttcagaccttgatatgagttttgaagcctttacggagctttatatcaatgatgtgaagaaccgtttgaaggaaaacacgtggcttaccaaagagcatatcatacgcacaaagatacttccgtatttcgggaaactgaaaatcagcgagatttccacaaaggagattattacttggcagaatgaaatgcttgcctatcgtgatgagaagaaaaagccttattcacagacgtatctgaaaacgctgcacaatcagttgtccgccattttcaatcacgctgtccgctactatgaactgcgttccaatcctgcggcaaaggtgggaaatatgggacgtgaggaacacaaggaaatgctgttctggacaaaggaagaatacaagaaattctcttttgagatgatggacaagcctgtttccttttatgcgtttgaaatgctttactggtgcggtatccgagagggcgagctgttagctttgactccggcagatttcaactttgataaggaaacagtcacaatcaataaatcctatcagcgtttgaaagggcaggatgtgattacttctccgaaaacgaaaaagagcaaccgcacgattaaaatgccgaagtttctgtgtgaggaaatgaaagaatatctcggtatgctttacggattgaagaagaaagaccgtatctttacggtgacgaaaagctatcttcatcacgagatggacagaggggcaaaggcggcaggcgtgaagcgtatccgcattcacgatctccgtcacagccacatttcactcttgattgatatgggcttttctgcggtggcgattgctgaccgagttggtcacgaaagtattgatattacttatcagtacgcacacctctttccgtcaaagcagattgagatggcagaaaaattagatgatttagggaaaggagattttgaaaatgtcagctaagaacagagataacaaaaatcgttggaggaatatcacagtagggtttcgagtatcgcccgaagaaaacgaactcattaacagagctgtagctctatcaggattgccaaaacaggagtattgttaccgccgttgcttaaatcaggatgtggtggtacagggcaatccgagagtgtataaggcgttgaaaacggaatttgccacagtccttgcggaactgaaaaggattgaagcaggaaaaggtgtggatgatgaactgctgagtgtaatagaactgatttccattattctcggcggtttgaaaggagaggatgcgaatggagaataaaaaagaaatgactattccaaatgtatctgcggcaacagatgcggaacagtcactttccaaatgtactgacaatagtatagtcaatcaggatacggatttcaaggggtacgagcaatcttttgaagaaatgcaaagggaaatactcagacagttagacccttcctatctgaaaacagtatcaatgacaacgctgtatgatacggtgtttgaggttcagacaccacttatcgacggtctgctccaaaggggaacttaccttttcgtaggttccccgaaagtgggaaagagctttatgatggcacagcttgcctatcatatcagcacaggcacaccgctttgggagtataaggtgcgtaaggcaacggtgctttattttgcccttgaagatgattacccacgtttgcagaagcgattgtttcagatgttcggtgcaaaggagacaggcaatctgtatttcgcaacggaatgtaaaacggtcaatggcggactggaagaacagataagagggtttatgagggaacacccagacacaggcttgattatcatagacaccttaaagcgtgtgcgtgaagcaggcggagcagattacagctacgcaagtgattatgatgttgtggcaaggctgaaagcgttggcagacagttacaaggtttcaatgcttattgttcatcatacacgcaaacaaaaatcggaagatatattcgatatgatttcaggcacgaatggtctgatgggtgcggcagacggtgcatttgttctcagtaaggacaagcgtacttccaacaatgccacacttgatgttgctggcagagaccagcaggatatgaaaatccatcttgtaagggacagcgagcgattggtgtggaactttgcaaaatcggaaacggagatgtggaaagaaccgcccgaacctctgcttgagaagatagcggatacgctcttttcggaaagtgacagatgggaaggaactgcttcggaactttgcgaaaggcttgcggtggatataaagccgaatgtactttctttaaggctcagtatcaacgcaagcaggctgtttcgtgattacggtatccgttatcagaacagccgcacacacgacggaagaaaggtttcactttggaaagaaaccgagcagacggcgtgacaaacggtgtcaaaggtgtcaatgtttttgagagcagcacgctgtgaaaaacattgtcaccatcgtcacactttgacaccggataaagtttaggggagtgtgcagagagtgccttttcaaaggcggctctttggtctcgcctgctggctcggtcggttcgcaggcgtgtgtgccaccggcacacgctcacccctcggagagccttcggagaacgcaaaacctgtttacaggtcgcatttttgatgggtgtacccgtcaaaagtgcttttgcgttacttttgacaaaagtaacaaaacctgagaatgttgaaatttacagatgggagatgaaaaaatgcagagaacgataagtgcaatggtcggtaaaggctcggtcaatcacaatagccgaaagttccgagcagaaaatgtagacggaactcgtactcatctcaatatcgactactgcaatgaaaatataaagacagtttatcacgaattgtttgatgaagcattggaaagatacaatgccaagcagataaggtcagaccgaaagataaaagattattatgaaaaaatccgaagttccaagcaggaaaaaccgttccacgaaatcattttacaggtgggcggtaagggaaatatgaacgccgatacggaaaacggagaactggcaaagcagattttagatgaatactatcagggttttcaggagcgaaatccacagcttcgggtgttctcggctcatctgcatatggatgaagctacaccacatctgcacatagattttgtaccttttaccacaggcagcaagcgtggacttgatacaagagtgtcactaaagcaggctcttgcaacgcaaggttttaagggcggcagtcgtggcgatacggagtggtcgcaatggatacagtccgaaaaagaacagcttgcggcggtgatggaacgttatgggattgagtgggaacatttaggcacacacgaaaaacatctttctgttttggattataaaaagcaggaaagagaaaaagaagtggcggcattaggtgcgaaaatcgagcagaaacagattgaatttgatgtgttgtcggaacgagtattgaactatgataaggcaaaagacgagctgtcaaatcttgaaatagagcttgatactgcaccgaaatatcagttgccagaaccagagaaatttatgactgcaaaggcatataaaaccaaaatggcagagccggttgtaaggaaattgaagcaacttgtcaaaacggtgcttgcccgctgctttgaggggtgggacaactatcataggctgaatacagcgaatgcacagttataccgcaccaatcagcgtttggagaaagtcaatgaaagattgaccgaagaaaacaaaatcctaaaagcagaaaataaagattacagcctgctccgtaaggtttttggtcgcaaacagatagatgatttgttggagcaggcaagaacagttaaaggtcgcaagcgtgataatacacgatcacgatagacaaaaatcacaggaggaaaaggaaaatgacaaagacaatttttgaagaaatgggcggaacttatagacaggtgggtgattatttattgccgaacatcacagtaccagccgaagaagaaatagagccgattggtttatgggggaaacgacatgcaaggcatttaaaggaacactataaagtgttatatatgaacctgctgacaagcggaaagctgcatagttatcttgcagaagtcgataagcaagcagaggatatgtttcttcgactggtaaaggaatatgccgacagacaagatgtgacggaacaattaaagaaagataatccctacgaatggattggaagaatgaataatattcaggcttgtgtgagggaagttgtaggaacggagttgatttacacataagcgttttacggtatggtgctcctgcgtttgctggagtgctgtggttgtggttgtaaagaggttgtgaaagattgaatttcgtaatggttggatgtataattaggaagtgaaaattttaatttgcacttccataaggtgaaatgtattgacacaaaaaatacagtatgatagtattgccattagaagaaagaaaggcacattttgtgtaaggtgaggaaatgattaatagataatttgatttaagtaagacacatatagttattgagcctgtagagaataggtttgttttgtgtacgcttaagttggattatcgcaagaggcatttcctttgttttccttttggaaaagaaataaggggctatttagcgagtctatttttgcgtatgcaaaaaagactcgtttttgtgtgttcaaaataataattggctcagacttcgaaaaggagaaactttaatgttgcagataaaaaaattaaatttaacacataaaaaagacctgagaataattcttaatgatttcaaccttgtgctaaatgatggagataaggcagttattattggagaagagggaaatgggaaatcgacattaatgaagtggatatacaatccgtcgcttgtagaaaactatatagaagcagatggggaaaggataatgggacacgaacgtcttggttatcttccgcaggagatgctcgatgaagataaggaaaaaacaatatacgaatatttttctgaagaggaaatattctgggagaaaacgcctaaagaattgtctgttattgcgggaaaatttggaatgaaaaatgattttttctacagtaaccagacaatgggtagtctttcaggaggcgaaaaagtcaagacacaacttatgaggcttttcattcgcgatgtttctgtgctgttgttggacgaaccttccaatgacatcgacattgcgacgcttacattactggaaaaaatcataaatgactggaagcacattgtgctttttatttcacacgatgaaacgctgatagagcgtactgccaacatggtgatacatatcgagcagattatacgaaaaacaaaggcgagatataccgtggcaaagcttccctatagacgctatgtggaagaacggcttcataaatttgaaatccaaaaacagcgggcactgagtgaccgtagggagaaaaagattcgcgatgaaaaatatcaaagagttatgcagagtgtacaaggtgcattaagaagttgtaccagacaagcaccgtctgttgccaaaaacttaaaggacaaaatgcatacggttaaggcaatggaacgaagatttgaaaaagaagatgaaaatatgactcagatgccggaacaggaagaagcaatctttgtcaaattaggggatgaaaactcacacattcccgcaggaaaaacggtcatagaatatgaactttcaaagcttgtgactccggatggcaaaagaattttagcagaaggaattcatttaaaaataaaaggttcagaaaaaatctgtatgataggagccaacggggcaggaaaaacgactcttctaaaaaagatagcggaagaactcctaaatcggaatgacattaaagcagaatatatgcctcaaacttatgaagacctgctggatttggatgttacaccggttgattaccttgataaaacaggagataaagaagagcgtacaagaattagaacataccttggttcacttaaatacacaccagatgaaatggagcatccgattcgggagttatcaggcggacaaaaggcgaaagtgcttctcttgaggatgagcttaagtggtgcaaatgttcttattctggatgaaccgacaagaaatttttcaccattgtccggtccggtaataagaaaaatgctccgagaatttccgggggctgtcattagcatttctcacgatagaaagtatattgaagaggtgtgcgataaaatatatcagctaaatcctaatggattacagctaattggtgattgataacaaaaaggatgaaagactgacaaatttcaggcttttagtgagttggaaagcatacaaagatttgaatttggaggatagattatggtacgtacagaagatgcatgtgaaattataaaatatgctttgcaaaacgaaattaaagtatatttagatggcggatggggtgttgatgcacttcttaaaagagaatcaagaatacacaatgatattgatttgtttgttgaactgaaacattatcatgattatatttatgtgattaagcagcatggatttgaggaagtaaatactgattatacaacggatggtcatactgtctggaaagatgataaacaaagaatcattgatttacattgttttgaatttacagatgacggaattgtttatgagggagatatatttccatcaaaaactttttccggtattggaaaagttggagatataactgtttcttgtattgaaccattgagtcaggtaatgcttcatttgggatatgaacacgataaaaatgatgtgcatgatgtgatgctgttgtgtgaaacatttcaaatagcaataccagatgaatataaggaaaagtaaaatttcagttttgtgttgaatctctaagcaaaatagcttataatttgacatgctacatatagttattatccacagttatcgagtaggtgttatcaatgccgataacaaaatgataacattagctcgtataggcaggataatatggatatatcaaataatcaaaagaacgagaaacattacagagaataattcctaaacaaaaagcgttagtctttgtagaatgggaataaagcctgaaatggctggttgatatgaactgtcggggccggctggaaagtattcctgccggccctgttcgatgcagcaaattcaggaggtgttatgtattccagtctaaaaacgtatctaattttgtttggcggtgtttttgcactgtcgacatcggccatttttgttaaaatagcgaatgccccttcatcggtcactgcattttaccgccttttcattgcggcagtggcgcttacgcctgcccttctgtgcatccccgaaagccggggggaaatcaaaaaactccaaacgaagcaatgggtacagattttgtccgcgggtttattgctggctctgcactacgtgctttggtttgaatcactgaacttcacgtctgttgcaagctccacggttcttgtgtgtctgcagcccttgtactctcttgcactggaacggtttataggcaaaaagaaaataaaatccgctgcgctggccggctgtgtaactgctttatgcggctgttttatcataggattcggtgatttccggctcgatgggaaaagccttctgggggatatattggcattggttgcagccggcgtgatatcactgtacttttttgtgggagaaaacatcagaaaagacatttctgccgtgacctactcaacgttaagctattctttcagtgcggtccttctggctgtgtatattctaatccggaaggaatccttctggggctatacgggacaaacatggctggcgtttctcggactggccctgatttcgaccattggcggacaatttgtattcaatcttttgctaaaaaatgtaccggcttctgcagtaacaatgagcattctgggagaacctgtcggcacctgcatacttgcttatctgatactccatgaagttattatacttcagcaatttattgggatactagtaataatgcttgggatgattgtgttctttttttccaaatccccaaagaaacgtgaaacccttaaaaatgggctgactaaaggaaaagaatagtggacacatttttaaagaaatgatactatcttaccagataaatcaagaagaaaacatatgaaaaagagggaactatcatggatatacaaaatctattagaacaggtaaaagcaggagaaatggagatttcccaggcggaagctctgctcaagaagctgccctacgaagagctcgggtttgccaagctggatcaccacaggaaagccagatcaggatttgaggaagtgattttctgtcagggaaagcagacacagcacctggtggagatttataagcatttttatgaacaagactctaatgtgctggggacaagagcttccagggaacagtatgaggcggtgaaagaggtgctgcctatggtgcagtatgatgaaatgtcaaaggttctttctatatacagcaaagagcgggagttgacgggatgcgtggctgtctgtaccggagggacatcagacatacccgtggcagaggaggcggctcagactgcagagttttttggggcaaaggtaaaacggatctacgacgtgggggttgcggggatacaccgtctcctgtccaaagtagatgtgatagaggatgccaactgcatcgtagcggttgccggtatggaaggggcccttgcaggggtagtggcaggcctggtggacaaacctgtgattgcagtccccacctcagtgggatacggagccaatttcggaggactctcagcccttttaaccatgctgaacagctgtgctgaggggatagcggtggtaaatattgacaatgggttcggagcgggatatatggcaacacagataaaccgcctggctgagcgttaacagcaggatataagggtgaggacgcaccgcttcagcggagagccatattataataactaaaagaaagtgttgccaaaaggaggatactgtattaaaatagtgcagtatctaaaagaattagaaaaagggggaaatctatgcgtaaattgtggaacagcctgccctttcgcctgctgctgggcgttgtggttggtataatcattggattaattgccaatgagagttttatgaatgtcattgttactgtaaaatatgtactggggcaggtgattaccttctgtgtgcctctgattattattggctttattgcaccgtctattaccaaactggggagcaatgcttccagaatgctgggaattgccctggtaatcgcgtatgtgtcttccataggggccgccctgtttgcggcggcggcaggctacggattcattccgcatctgtcaattgtatctacggtagatggattaaaagaacttccggaggtgattttccagctggagattccgcagattatgagcgttatgagcgcacttgtattttctgtaatgataggtctggcggctgcctggacaaaagcaaactatattacaggggttttgaatgaatttcagcagattgtgctccagattgttaccagagtgattatccctatcctgccgttttttattgcgtctacattctgcgggcttgcctatgagggaaccattaccagacagctgcctgtgttcattaaagtcattttaatcgttatgctggggcattacctctggctggctctgctgtatctccttgcgggcctgtattcggggaaaagtccgtgggaagtgcttaaatattatggaccggcatacctcaccgctgtgggtactatgtcatcggcagccacactggcagttgcattaaacggagccagaaagtccaaggtgctgcgcagggatatggtggactttggtattcccttgtttgccaatattcatctttgcgggtctgtgctcactgaagtattctttgtcatgaccgtatcccagatactgtacggctcactgccctcccctggaaccatggtattgttctgcctgctcctgggggtattcgccatcggggccccgggggtgccgggaggcactgtgatggcttccctgggactgattaccggcatccttctctttgacgagacaggaaccgccctgatgctcacgatatttgcacttcaggacagttttggaactgcctgcaatgtaacaggagacggtgccctgactcttatgctgacagggtatgtagaaaagcataaggtggaggagcagaaactggaagttaaattatagaaccagggtaacagagtacctgccgaaacaaacagccggcgggtactctgtttttgcgtacttacataacagaagataaaattccggcaacttagggtggaagccagatggctggggtggtataattttgatagtaaatgcatgaaggataggagaagctatgggaaaacagaagaaaaggaagaaaaaaggtgcaggggatattgttcgcagtgtgctgctgattgtatgtatcggtatatttttattttctgccttccagttatttcgtatttatatggagtataaaaagggatccgatgaatatgactccataaaggatactgccgtcattgagccggccagggaggagactggggaggaaacggaggaacctcagattcaggccccgcagattgattttgcgtcacttcaggccacgaaccccgatgtggtgggatggctggagcttgaggctatagatatcagctatcccattgtacagggaaaggataacgataagtatcttcattatacctttgagggaaagaagaatgcagcgggagccatttttatggaatataccaacaaatcagatttttcggactgcaatacaattatatatgggcataatatgaaaaatggttctatgttcgggcagctgaaaaaatttcagcgggaggatgtgtactctgtaagcccctatctgtggatctgcacacccggcggaagctaccgatatgagattttctcctatcataccacaagtgccacaggggatacatatacccttttcagtgcgccgggtcaggaattccagcagtatttggaaaaaatgaaaagtgcttcagagatagaaaatgatgttcaggtttcacagaacgataagattgttacattatctacctgcaccggaaatgataagacaagatttgtggttcaggccaaacgcctgccggaggtgtataagtgatgaaagaaattgaaaaactgcagcaaatcattgacaaatatgataatattgtatttttcgggggtgcaggagtgtctactgagagcgggattccggatttcagaagcgtggacggcctgtataaccagcagtatgactacccccctgagacaatcctgagtcacaccttttttatgagaaacccccaggaatttttccgcttttaccaggccaagatgctctgtgacacggcgaagcccaacaaggcccatctaaaactggcggagttggaacaggcagggaagcttaaggggataattactcagaatatagacaatcttcaccagatggcggggagcaaaaatgtttgggagcttcacggatctgtgtatcggaactactgcgttcgctgcggcagagcctatgactttgccttcatgaagaaagccagcgggattcccaagtgtaaatgcggcggaatggttaagccggatgtggtcttgtacgaggaaagcctggacagccataccctagagggggcggtatctgccatcagcaaagcccaggtcctgatcatcgggggcacttccctggccgtctatccggcagcgtcgctgatagattatttccggggggaggccctggttgtgatcaacaaggctcccacacccagggataagcaggcggatcttctgatacaggcacccatcggggaagtgttcggacagataaccgtaaaataactttcggaggtttacgatatggtatatgaagtgggagacattgtaaggctgaaaaaacagcatccctgcggcagcagtgaatgggaaatcctgagggttggggccgacttccggctcaaatgtacagggtgcggccatcagattatggtgaccagaaagctggtagagaagaataccagggaattgaaaaaaagggcaaaataacttgcattctcatacattttatggtagaatcaaaaattgtgatatattataagatatccttgttccctgaagagatcagggggccaaaagaccaaaaggaggtaaaacagcatgaacaagtatgaattagcattagttgtgaatgccaaaattgaagatgaagctcgtgcagctgttgtagaaaaagcgaaaaaatacatcgaacgctacaacggaactgtaacagaagtggaagaatggggtaagaagagattagcttacgaaattcagaaaatgagagaaggcttctactactttattcagtttgaggcagatgcagcttgtccggcagaagttgaaagacacgtgcgtattatggacaatgttttgagatatttggttgttaaaaaagaagcataattttttaactgaaaagcgccattttgattataatggttctgatagccgatgattgataatttgtaaataatacgaggtaatagatatgaacaaagtaattttaatggggcgtttaacaagagatcctgaggtaagatattcagcaggagagaatgcactggcaattgccagatatacacttgccgtagacagaagattccggagagacggagaggcaacagcagattttatcagctgtgttgcatttggcagacaggcagagttcgcggagaagtacttccgccagggaatccgtattaccatatgcggaaggatccagacaggaagctatacgaacagggaaggccagaaagtgtatactacagaagtcgttgtagaggagcaggaattcgctgagagcaaggcagtcagtgacagccatgtgggacaggcgtcacagcaggccgcagctcccacaccgaacaatgcagcatctatcgatggctttatgaatattcctgacggcatagacgaagaactgccgtttaactaaaataaggaggttaaagctcatggcttacaataaaagtgaaagaccagattctccaatgaagagaagaggcggtcgcagaagaaaaaaagtttgtgtattctgtggtaaagagaacaatgagatcagctacaaggatgctaacaaattaaagagatatgtatctgaaagagggaaaatccttcccagaagaatcacaggtaactgtgcaaaacatcagagagctcttacagttgaaattaagagagcaagacatatcgctattatgccttacgtaacagactaaaaatgaatctggataaaaccgttattgcttgtgcagtagcggtttttttaatgggaatgacacatactagaagggaagcaaatgttagaattctatccaggaaaggcaaatatatgaaatttgatgcagtttattatgagacagaaagtttgtcctaccctctgggaaaggcattgaaggagaggtttggcaatctgccctggatccctatagagaaccataattccatcagggagatgcaggaaaaacctaatgcggagttcgggcacatgaaacgcaacctgattatcggcattcgaaaaacccataaatatgtagaaaatcataaggtgtctgactatcttgtcccctacacgtcctcaggatgtacggccatgtgcctgtactgctatcttgtatgcaactataataaatgtgcgtatttgcgtctctttgtcaatcgggaacagatgctggacagactgatacgcaaatccggcaaaagtgacaggcctcttacttttgaaattggcagcaatagtgatctggtgctggaaaatactataacagacaatctgacctataccatttccagatttgcagaggagggcacaggctctcttacctttcctaccaaatttgatatggtggatccgctgctaaatctggaccacagaggaaaggttattttccggatgagtgtcaatccccagtccgtgatccggaggatagaactggggacttccgggctgaagcagcggattagggccgtgaataaaatgtgtgcggcgggatatccctgcgggcttttaatcgcacctgtcatattggcagatggatggaaagaggcgtacaccggtcttttcgaggaattgagagaagggctgtcagaacaggtgagagaacagatgtttcttgagattatactgatgacctactcttatatccaccgggccatcaatgaggaggctttccccaatgcccctcagctgtatgacaaagacctgatgacaggacggggcagaggcagatattgctatcgtccggaggcgagagcagaggcggaagcattcctgcgggaggagattaaaaggattcttggggatgtaccgattctgtatatcagttagaaggacagagcctcataaatacacatccccccgggaaagctttttctagggctggttatttgggaagttcaatcatcttatccagttccagtccatggaataccccctgaaacgttagatgtgtcagaagttccgcaagataagcagggctgtatttcatgccgtcctccagccatttgcttgtgattcctatatgggcagagataatatactgaatcaggtaggctttaggcagagacagatcttcatcgctgaactggtttagaatttcagtataagtaattcgggcactttcttccattttctgacggaaggagggcagaccgtttcttcccagcatcacccggaaaaattccgcatgcccggctatgtattggaaatgcttcacgtagtatttacagctgctcttagagcttaagccggattccctggcataggaatccggctttgtctctttcctgagctgagtaaagatctcatctgtaatggtatctaaaaaatcctgtttatcttcaaattgagaataaaaagtacttcttgcaacctgagcctcttctaccagattctggacagtgatttcgtcaattgtcttctgatccataaggtgaatcagagccgccaccagatactgacggcttcttgtctttctgagatctccgtgttccttcattgatacacctccccggcagattggatttataagtattataaatcccgtcaagccgtttgtaaagtggaggatatcatggggcagtgccgaatttacctgctgtaaatttggtcaggaagggggtaataacagtcgtaagtatcatcaccagcgcgatctgtgcggtagctgcctgaagatagggcgcatgttcgggaactgcctgggcgatctgggaaggtgcccctatggccaggccggcgacacagcaagtcgctacagaggcgtaccctggacgtctcaaaatccagtgatcggtgcagaacgcaggtattatacttatgatataaaatactaaggtgagaaagattccctgcagtccggaccggaaggcggtgaccagatccacggatattccaaagcaaaagcccagaaacggaagaataatcatggaaccaggggccataagcttttggatatccccgtctatgtttcccaggagaattcccaggaaaaacggcacaaggagtgcgattagcgccatataatcaaaggcggcgccacttgctgcaccaagaatcaaaaggggaatggtgggcatgcaggctacattccagagtccaaaggcggcgtgatcaatttcatccccataggatttcgtaagtgcaagaaatactccggggttattgctggcaagaacggatacaaaggccatagtggaaatgccgaagatccctttggctccaaagctgtgcatcagaatcattcccgcagcaaaggccatgataagcttgaccgccagcagggtaccgtgccgtttcagaaccgtgcctatctgccgcacaggaagctgactgccaatgataaaaagcagcagtcctgccaggcacatagtgccggaggaggaaaagagtgcggtggtagggcctccgatttcaacgagaccgggtgcccaggtatgaataaccgccgcgataagtaaaggcccgaccatgagtcccccaggaaacttttgtaccgttttgagtattttcaaaatatccctcccgtcttactttattataaggataccggccgctgttatacggccggataatctgtcaaatatttaatttcagcagttcagcggcattggtgcgtccgatgcggatgcgatccgcatagctgagaggtacattatcaaaccaggtagcagcctcatccagactttcgtatggggtatccgaagagaacatgacatgcctgttatcgcactccataagggtatcaataaaagcacgggtatgaaaatgtccgctggtagtcatatatacgttcttttccatatattctgtcaatggctttttgtgagcgccgcagggtttctggttattcagacggtgctgaagacggggaagcccaaagggaagtccctctcccagatggcccagaatcagcttcgctgtgggcagttcgtcaaagataccgctgcataacaaacgaatggcatggatggcagtctcagcgccaaagccccaggcagaacccaacaggcccggatagccctcataggctctctgctgatttggaaccggatcacggggatgcaggtaaagcggcacgtccagctcaactagtttcttccagaaaacaaagttttgcttttcgtctagatattctacgttgtttttatcatttttcatggtatatccgtttataagggcgcctacgaaccccagctcttttacacagaattccagttccttgcaggcagcttcaggatcctgcatggcgacagctgcaaacgcgttaaaacgtttgggatatttctgcacatagttttcgtaaatccagagattcatttcatgagctctggctaccgcgtctttagtatccagcacttcctggatacccggctgtgtcagggacataataaacatctcaacgccattccggtccatatctgcgatacggatgtcggccgaatgcagtctggctttaactgcttcaaaatagtcttctttatttcttgcagtttcattctgcggatccccggtagcctcccactggggagattcatagtgttcctccagggcaatctttccgtgcatgatttcctgtccgtaaggagcgacatagtcttttacatattcttttctgaattcaaaacccataatacttacctcctgaaagtgttgggaaatctttgcgcgccagatttctgttgtttgtgattgcattataacaaatgaaacctgggattactatcatcagaatatcggtttttgttcggattccttcatttaaagagggtatgtttggaaaaaaaggaaaaacatacacatgttagagttttgtccgcaataagaaatacggcagcggtctagcagctctcctctgtgactttgttacggtgaaaaagaatcttttcctgtagactgtaagtcagtaagagacagggaggttgctgttgtggcaaaaaaaagtgcgtttgtatcagaaggaggctgtgtggcatgcggagcctgtgagaatgaatgccccagagatgcggtggcggtatggagaggatgctttgctaaaataaatagggagaaatgtataggctgcggtctctgcgccagggtatgcccggccaatgccatctcactggtaaaaagggaggtagaagcttgagaaagaagaagtggtacgaatacctgtggatctggtccataatttattttgctttgggcttctttaatatattatttgcatggctggggatgatcgattttttacttccaatagtaattgccgtattcgggaaaaacaaatggttctgcaatcatctgtgcggccgtggccagctctttgcccttctggggggcagactgaaattatcccggaataaacctactccccattggatgtattccaaatggttccgatatggatttttgctgttctttatgactatgtttggcagtatgatattccagacatggatggtggcgtccggagcctcagatttgagagaggcaattaagctcttatggacgatccgtgtgccctggggctggacctataccgcaggtacagcatccccgtgggttgctcagtttgcattcggattttatggtctgatgctcacatccgcaattattggccttgtagtgatgatgttatataagccccgcagctggtgtaccttttgtcctatgggtacaatgacacaggcagtctgcagactggaacatagagaatgatgcaaggaaaccccacaataaacggccccctgtctggcagacagggggccgtttattgttgacaggctgcccgggggccattcagaagaagttgcattaaaaaacaaaataggatactatatgaagtaacatctaacttgatggaaaggtcagtgtaacttcgatgaaaaaaaatatattattgcgtacaaatctactggtatgtctgatcctggcaatcggtttctcgctcactgctatgctcagctaccgggcgaattataacgcctcgctgcagaatatagaacaagtctccgaccttacgtctgaggggatttattaccagctggcaggtacgttcactaagcctgtgaatatttcacttaccatggcaaatgacagtctgctcagggacttcctgcttggggaggaggcccatttggaggatgagggatatacggagacgatccgggaatacctgcgcacataccaggagaaatacggatatgattcggtttttctcgcatcggtggctaccgaacgctattacaactttaacggactggaccgtgttctggaaccagaagatccggaaaataaatggttctatgagatgctggaaaaggacgaggattactccatcgtggtagacaatgatcaggtggcaggagctgagaaccggattaccgtttttgtcaactgcaagcttaccggtccggatggtcaggttctgggaattgtgggagtaggagtggctatttctaatcttcaggagcttcttcagagttatgagacagaattcggtgtccatgcctatctggtaaatgaccggggaatgattgagatttccacagaatatacagggtatgaggcagtcagcctgttcaaacggtatacgtttgcctcagacattcagcatgagattatggactgggaaactgcaggggaagccaaaagcctctgggctgacaacggcaagggtgacagttatgtggtaaccaggtatattccggagcttatgtggcatttagtaattgagagaaataccgggaatctggtggatgagatgaagcaccagatgctgcagactgtgatagtcattcttgccatcatctttggggtgcttttgattatcaccttggtgatccgcaattataacaagcagattctctcattggtgaaggcagtagagagacaacaccacacggtgttcgaacaggccactaatcagttgtttgaagatatctacgagcttgatattaccaataaccgtccggcaaacgaaagtacagagcgttattttgaaagccttggggcaccggcggggaccccttatgacaaggcactgaaaattattgcggaaaagcagatcaaagaggagtaccgccagggctatctggatatgttttccccggaaaatgtataccgggcgtttcaggaaggacatgaaagcctgcactatgatctcatgatctccaaacatggagagaagtactactggatgcggatcacagcacttatcatcccctgggagtccgatcattcccttcatatgctggtgtatcgccaaaatatcgatgtagagaaacagcgggaacatcaaatgcaggagctggcccagacagatgagatgacagggatgctgaataaatcagccacccggaggcagatcgaagcactgctaaagaaggaacccggaagattttatgcatttttcatttttgatattgataattttaagcaggccaacgatcactacgggcatgtatacggggacggtgtcatcacagaatttacctgccgcattaaaaatcattttcggctggacgatatccttggacgcatcgggggcgatgaattcgtcgcttttgcggctgcccataacagggaatgggtgaatgaaaaggcagaagaactctcaaaggctttggattttgtatatacatccagggaacgggaatggcatgtcacagccagcattggagcaatctctgtctggggaaaagggagcagctttgagctgctgtatcagcatgcggatgaggctctttatcaggcaaaaaaactgggacgcaatacctatgttgtatatgagacactctcttctggggggcgctgactattgagacagaacccgggggataggtgctgaggctactgtgataaccaaacggcgctgaactggcgtcctgaatttaaaaagtttttctgaaatatcgttaataacccattaattgtagaacaaaatatgtttgtttgttccatttttaagacgttaattacctgtcgtcattgacgtatcatgcttttcgtgttaccataaggttatcacgataacaaaaaggcgcagaggacttgtctgcattgccggactcattttatgcatttgtgtgcattattcctgctattgtgaaacagtctgaaaagctgttatcaggatttaaagtttaacagaatggagggttttcatgaagaaaaacaatgcggaacagaaatctgacactacaaaagctggtaaaacgatagatacttctatcgtatgtatcgcagtggctgtaacggtgataatatccattgtgtgtatcgccttctcagacaccgtatctgtatggttgtcgtctatttttaactatctgacaaacaaattgggatttacctttatctggtttgcggctctggtcattgcattctgcctgtttattgctttcagcaaatatgggaagattcgcctgggggcagatacagaccgtcctgagtattctaatatcagctggttttctatgatatttgcggcaggtatgggaatcgggcttgtattctggagcgttgccgagccgttgaatcatttttttgctccgccggtagccgatccggcatcaccagaagctgttgttgaatctctgaagtatacgttcttccactggggaatccatccctgggcactttatctggcggtcgctgtacctatgggatattttcacttcagacagaaaaaaccaatgctggtcagttcggttttcacaccttttctggagaacaaatcttttaagaagcctcttttgaaggggattgacgcttttacgattattctgattcttataggagttgcaacctcctttgggttgggcagtcttcagattgccagcggtctggactacgtttttggcttttctatgggagattttactcctattttgatcattattgtatttgcagtattgtttattatatcttcctctgcgggtattgagaagggaatgaaaaagctgagcaacagcaatacggtcattgtgtttatggtactgttttttatcctgtttaccggccctacaattagtctgatcaaaagtactacggaagcaataggcgcttatatccatcagctgattcccatgagtttcttccaggatgcagacggggcggttgctgctcatacgggagaaaactggattggcaactggaccatattctactgggcatggtggattacctggaccccatttgtaggaagttttatagcgcagatatcaaagggaagaactcttcgtgagtttattctggcggttatgtccatcccaacgattctcagctgtatctggtttggcgtacttggaggttctgccttacatattgaattggagaacccgggaagtattgctgtgaacggtgtggtagataccaactcctctatttttgccatgctttccacgctgccgctgccccagattatatctgtactggttatcatatccctgtccgtgttcttcctgacatcagcggatgccggtgttcaggtagtggccgttatgagctcacggggcatggagaataatgacagaaagattaagattctgtggggcgtgattctggcgatgctttctattatgtttgtagtaaccggaggattatctgctgttcagtcactatcatttgtgtttagttttccgtttatgatcctaatctgctttatgctggtttctttttataagcagctgactaagaatgagctgaaatgatactgtggccggcgggggaataaagcggcggcggactatgcaaagacaggaaaaggcagcagcagctatcaatgattatcattgatgctgctgctgccttttggcatatttagattgtggttttccagaaaccgtgaagattgcagtatgcgtatgcggcaaccggacggtcgccgtcacataggaaaaattctgctacaggttcctcgtcagccttcagattaattctctggcagcctttttctgtttccagatagacccactcaatgctgtgttcttcagacatgggatggaacacgctgcctactttgacagttacctgattgccgctgcactctacaaccggcagatgcttttcctgtgccccgtcagatgtgttgggggtgagcttgttcaaaggaataccgcagcaggaaaattcttctttctccccgcagatctcctcgatcataatgccgcacttatcacaggcataaaaggcaggttcttttttcgccataatatagccctccttaattttataatatgtctcatgaagatgacgcttatagtttccgcagtttttttgaaatcattcttttttctatataagaggagtcaatcccccggggaggcttgcggcagaaaagagagggtgtgtataatcaaaggtatgaagatagaagtaggataatgcaggaggtgctgggatgaaagacagggagactttgtggaaggaatgcgcagcatttcacggacatgagtgcggagggctggccattggatatcaggctgccctgtatgcggctgagctgctggagctgggattttcagatgatgaagaggtggtatgtgtgacggaaaatgactcctgcggagtggatgccatccaggtgatactgggatgcagtgtgggaaaaggaaatcttttgttccggctgaggggaaagcaggcgtattccttttataaccgatccgcagggaccgcagtgcggctggtactgaaaacaaaccgtggaaaacggggaggagactgggagaatacagtaaaaaatgtatcccccaaagagctttttgatgtgaaggaggctaaaatgcagcttccggaacgagccagaatctttaagtcttacgaatgcgaagtatgtcatgagaatacggcagaatccatgctgcgcatagaagatggcagatatgtgtgtctggactgctggcatacatatgacagatttgggctttaggaacctcaggaaagaatgggtgccgctatccccccatggggcttgtggcgccctttttgatttgttaaagtaattctataaaataaattggagaaaaagagaatactatggcggaattattggaaaaaattgcagaatattggagcacccgtaccgaggggtactctgaagtaaaccataaagaactggagggcatgcagaaggaagcgtggcttgggacgctcaccgggcagtttccgcaggtccccaaagaagaactgaggatcctggatatcggaacaggtcccggatttttccctgtgatattggcagaggcagggtattatgtgacggcagtggattacacagaggaaatgctgcacaaggctgcggagaatgccggccctctcggagaacgtatctccttttaccggatggatgcacagaacttggaattcgaggacgagagctttgatgttattatttccagaaatcttacctggaatctggagcggccggtacaggcgtataaggagtggtaccgggtgctgaggccaggcggacgtctgctgaattttgatgccaactggtatggttatctctacgatgaaagccagcgtgagggatatgagcgtgacagaaaaaatgtggaacaatatcagctggacgaccactatctctgtacagatattgacgcaatggaggaaattgctttaaaggttcctctgtcccggatgcagaggccccagtgggatcgaagcgtattggacaggattggattctgtgagataagggctgatatggatgtttggaggcgggtgtggagcaaagaagaaaagctgaattatggctctacgccgatgtttatgattctggggagtaaaggacaggtagatgtacatgcataaagaaacggaaaataccatcagaaaattttgtctggaggggctttccctaagtccgggagaacgtataagcggagaactggaactggctggaggaaaattctcccttccggctgctgtcgtccgtgggacagaagagggaaaaaccgtagtaattacagcaggcatccatgggggagagtatgtaggcattcaggcggctgtggagctgtcgcagagccttaagccagagaagctgcagggaacagttatcattgtaaaggcagtgagccgccgggcatttgaacaccgggccggaagtatgggcacggaggacggcagaaatctgaaccgggaatttcccggggattcccagggaagtgagactcagcagctggcctgggcaatttcaggggaactctttggggcagcagattattacatcgatctgcacagcggcgatgactatgaacagctggcaccctatgtgtattatgcaggaaaggccagcccggaggttgtggaggcctccagaaaaatggcggagcaggtggacgttccttatatggtccgctccacagtgtctaccggaggcgcatataattatgcagcatccagaggaattcccggggtcctgattgaacggggcggcatgggcacctggacaccggaagaggtgcagtcaaccaaacgggatgtgcggagtattctatgcagtctggggatttaccgggggcagcgggggtacagaacctattatcctctggatgtatcggacattgtgtatcaggccgcggagcatacggggttctggtatcccagaaagatgcctggggatctgatccggggcggagaggaactgggggttgtgagagattacgaaggggaacttctggaagtgtgccgggcggagtacgatggtgtgattctttatcagacgggcagtctgcaggtactggaagatggtcctatgatagcctacggcaggattgtgagacggcatgatgacagaaaagaacgaattactgagtattggacaaaacgaagtgaaagctttctggaacagagaagggcggagcttgacagtcctctggccaggcgttggatggaaaggatagaggaacagattggcactggaaggaggctgaagatactggatgtgggctgcggaagcggttttttttccattcttttggccagacggggacatgaggtgattgggacagacttgacgcctgagatggtggtgaactccagaaagctggccggagaacagcaggcaggctgcaaatttttggtgatggatgcggaggcactggattttgacgacgaaacctttgatgttgtgatctcaaggaacctcacctggactcttccggatgcggaaaaagcttatacgcagtggtgccgcgtgctgaagccggaggggattcttctgaactttgacgcaaattacggggcttcagatttttctgatacttcggagcttccggaaaaccatgctcattttgaggtgggagatgagatgatgcgggagtgtgaagaaattaagcgtcagctgccgatcagtacctatatgcgtccggcctgggacttggaggttttggggcgaactggtctggaaaggtttgaaattgacctgggagtgagtaaaaaggtatatctggaaaaagatgctttctataatcccacgcctatgtttatgatttgtggaaaaaagggaaatactgtatgaaaaaatatatagcaaaacggctgctgcagctgatccccatcttgctgggaataacactcctttcgtttgcacttatgcacagcgcctccgcagatgcggtggacgtactggaggcaaacaggggcggggtgctgtcggaggaggcaaaggctaaagccagagaggagcttggactggacaaaccgtttcttgagcaatatgcagtctggatgagacaggttcttaccggtgatatgggaaagtcttatgtgtctggaaaacctgtattttcttcctttgtgcaaaaactgccggcaaccattgctcttaccatatcctctgtgattgtgaccattctgctgtctgttcccctgggggttcttgcagcagtgaagcaaaaccggtttttggactaccttattcgtttcctgagttttatcggaaactccctgcctaacttttttgtttccctgctgctgatttatttctttgcactgaagctgggatggtttccggttatggggaatgcgcagggctggaaaagtatcattctccctactttgactcttgccattgctatggcatctaagtatacccgacaagtgagagcctctgtgctcgaggagctgaacaaagaatatgtaatgggggcaagggccagaggagtaagagaggggaggatcctgtacttcagtgtcctgaaatcgtccatgcttaccattgtgacgcttctggctctgtctatcggatcacttctgggaggaacggctattgtagaatccatttttatgtgggacggtgtgggaaaaatggcggtggatgctattactatgagggactacccggtgatacaggcctatgtaatctggatggctgtaatctatgtggcagtcaatcttatcacggatatcctctatcattatctggatccgagaatacgtctgggacaggaggaagctgcatgaggagacaaaaagtaaagctgtatgttctgcttgcactggttcttctgctcctgggaattgcggcctttgctccttatctggttccctttgatccttatgaacagaatctgtcccaggccctgcaggctcccgggggcagtcatctgctggggacagatcggtatggaagggatatgttgtccagggtgattatgggttcacagacgactatttactccgcgctcctgctggtggcggtgataacagtcacgggtacgtctgtgggcctgttctgcggctggcggggaggaaagctggattctttgatcatgaggatatcagatatctttttggcttttcccggtatggtatttgccatagcggtggcgggagttctgggagggggaatactcaatgcggtgatcgctctggcctgcatctcctggccaaagttcgccaggctggcgagaagccaggtgcttatgatcaaagatgccccgtttttggccgcggccaggttggccggatcagggggaacaaagattgtattcagacatatacttcccaacatacttgggcctgttctggtgacagcaacactggacatcggtactatgatgatggaaattgcaggcctttcctttttggggcttggggccaagcctcccatcgcagagtggggatcgatgatgagcagcgggcgcagtatgcttcagacgtcaccgtgggtgattctggctccgggatgcgctatatttgtaacagtaatgctatttaatctgctgggagacactgtgagagatgtgatggatccaagacagtcggtacaacatgtggagaggagataaggaatgaagagaagattgacagcagtattgctttgcgctgttatggcagcgggaattcttgccggatgcggagattccggggataaaaaggcagaggaagagaaacaagggaccacggcccaggcgggggagaagatatttaactatggaaccactgcctacggagtagagatgggaaatacaggtctaaaccctcatgacaattactccggttggtccgcagtgcgttatggcgtgggggagacgttgtttaaatttacggaacatatggaattagagccctggctggcagagagctatgaacaggtggatgagtatacggttaagattacactgaaggataatattatgttttccagcggacgaaagatggacggccaggcggtgaaggaatgcctggaagaccttgtggcagtgcatgacagggctcccggggatctgaagatcaaggagattgcagcagacggcctgacagtaacgataacatcggaggaaaaggttcctgcgctcctgaattatctgagcgatccttacggtgcaattattgatatggaatatggagtgacagaggataaaaacgtggccggaaccgggccgtttatcgcagagaatgtttcggatacggagataagcctcaggaagaatcctgaatattggggcggagaggtaaagatggacagggtaaatgtaaaagagattattgacggtgatactcttaccatggcgcttcagtccggggaaatagatgccgctcaggggctgccttatgcaagtctgcctctgttccaggagaatgaaagctataaggtgagttctgtaaacacctcacgggtattttttgcgcagctgaactatgatacgccggctctccaggatggcagggtgcgaaaggcaattgctatggggattgacaaggagggctttactacaggactgcttgggggcaacgggacacctgcagtggggatattcccctctaacttttcctttggaaatgaagcggtgaatgcgccccaatacaatccggaggaaggaaaaaagcttttagaggaagccggctatacggatacagacggcgatgggtacgtggataaagggggagaacctctggttatccgctggcttacgtatccggggcgccaggagctgccgcttctggctgaatccgcacaggcaaccttaaaagaaatgggtataaaggtggaggtaaacaatacggcaaatcagcaggattttttggataagggagagtgggatatctatgccagcgcctttgtgacagcgcctacgggagatcccgaatatttctttaccacccattgcctgaaggactctgccaagaacagggggaagtattataatgaggaactggaaaaattggaaacacagctccacggagaatttgacccggcaaaaaggggagaactggcggtgaagatgcagcaaattctcctggatgacggaggctttatctttgcgtcccatttgaaaatgtcctttgctatgaaggcaaacgtaacaggatttgaagcccatccgtcagattactatgaaatcacagcaaatcttgattatgaatagaggacaggcagatatgaaacagccgctgctaaaactggaacaggtagaaatctgctaccgcagaactcccgtggtgcacggcttaaccttagaagtggcgccaggggagattcttgggattgtaggggagtccgggagcggaaaaagtacagtcatcaaagggattataggactgctgggtaatgagggagctgtgacagagggaaagatctattacaaaggggaggagcttctgcatgggacaccggaggaacttaggaatattcgcggccctgagatggggatggtattccagaatgcgggagcatctctttgtccgatccgtaagataggagatcagctctatgaggcagtgatccagcacgagcgggtcagccgtacagaggtgcgccgcagagccatggagcttttcgagaaaatgaagctgtctgagggcagccggatactggacagttatccttttgaactgtcggggggcatgaaccagagggtggggattatgatggccatgattcttaaacctgctctgctcctggcagatgagcctaccagtgccctggatgttaccatacaggcgcaggtggtgagggagatgatgaaactgcgggatacctttgggaccagtattattatagtcacccacaatattggtgttgtggagcacatggcagacaacatagcggtcatgtgccagggaaaactggtagagtatggtacaaagcacgaagtgatccattctcccagagatccttataccagaaaacttctgggagctgtgctgcgtctgaaccggaggtgaggatatgaaaaatattttagaagtccttgatgtaaaaaaaacatattataaggggaaacagccttttatggcggtgaatggactaagcttctcagtaggagaaggggaatgcctggggctggtaggagagagcgggtgcgggaaaagcactgcggcgaggattattacaggcctggagaaaccagacagcggaagcatccggctggagggcagggagatcctggatgcggggagaaaagaatggaagcggatttattcctgcatacagatggtgtttcagacacctcaggattcttttgacccaagacagaagctggaggacggtatcctggaggcactgtgcaaccaggggttgaaaaagagggaagcgcaggtgcgtattcgggagcttctggagatgacagagctggaggcagaatatgcaggcagatatccccatcaggtcagcggcggccagtgccagcgtgctgccattgccagagcactggcggtttccccgaaacttctcatctgtgacgaggccaccagtgcgctggacgtcactgtgcaggcccagattgtagatctgctgaaaaagcttcagagggatacacagatgtcttatctgatgatcagccatgatctggcactggtacaggccatgtgcgacagagttttggtgatgtaccagggaaggattatagaagagggcacaccggatgaggtgattcgcttccccagggaggaatataccagagtattagtggattcggtgttttaaggggtatccattttcagcagtgggagaagaaaggtaaaggctgctccctctccttccctgctgtctacccggattgtccctccgtgagcctcgacgatccacagaaccatagaaagtcccagaccggaatgggtttcctgtgttccttttctgactttatcttcccgataaaaacgtttccagatgtctttctggtgctccggtgcaatgcctatgccgtcatctcgcacacagccctccacataactccctttttttcgaagagttatccacgtggaacctccgtgttttccatattgaatactgttttctattagattaaccatcatgcgcatgagcagattctgatctcccttcacaaccagactctcctctaattccagactcagatgaatattgtttccggatgcggactcttccagttcgccggcaacaatctcagtcagcatacttatgtttactggctccagctccagcctttccttggccgaatcctgccgggcaagcataagaagctgagagatgagggcagatatttttctgccctggcccagtatcacttctatacattcgatcatttcctctctggtagtatccgggagaagggcatactcacactgggacagaattacagctgcgggtgtgcgcagttcgtgagaggcgtcggcagtgaagcgcttttcattttcaagagctgcctctacgggtttcagtgcctttcccgtgacaaaatacccgctgatgattgccagtactgccagtagaggacatacgataaaaagcaggttaagcagaatggaattaatctgtgaaaatgcgctgagtgaggccacacctcttacccaacagacgacctgtgtctcatgagtcatagccatatcgtatgtcagccagcgatggccttcccccttaatactctgtaccttaagattttttaaggtagtatccaggggaaaatcagcagggacactccctccggtcagccgtccctgagtatcatatatgctgaaaaagaatccgccatcataaaaatcgctggtttcctcttcttcatcatccacatctatatcatctgcgaattcgcgcacatgttcaattaagtctttctctgtgccggagagcagcaggctttccgacaaggcggccacaatccccagaacaaacagggaaatggctatcacgaagcaggcataccacagtgttatctgcatcttaactgacatttttttcatgagtctctcctcagcacataaccgcttccccgaaccgtatgaatcagcttctcttcaaatccgtcatccagttttttcctgaggtaacggatgtagacgtcaatcatattggagccgcccatgtagtcatagctccatacatgctcttctatggcgcgccttgagagaacgattccctgatttctcattaaatattccagtacggcatactctctggaagacagctcgatttgctgtcctccccgccatacctggtggctctttgtgtctaccttcagatcagcggcttccagtacatttacttctccggaggattcacagggcacgccccgtcgtatcatgacacggattctggcaagaagctcttcaaaggcaaatggcttcaccagatagtcatctgcccccagatccagccctctgaccctgtcttctatgctgtcctttgcggtcagcagaagtactggcacagggttaccctccgcccgcagtttccggagtacctccagtccggatatacccggcagcataatgtccagtatgactgcatcataggctgtcacttctgcgaaatccagagcctccttcccgtctgcacaggcatctacgctgtagtattccctctgcagtctcttttttataatagtaagcagattgacttcatcctctacgactaatactctcatatcttcctccttttcctgttaatgtttattatataccacaacctgtctggtttccttaattgtattgcataaaaatgaaattcagattaaaatttgcgttttaatactgttttaatcttttccctgtatgatgaaaatataaatactaaatactatccataaaaggaggatgctaatatgaaagcgaaaaaaattggcacatttgccgccgctgctctcttggtatctgtgactcttttcagcggctgcggggatgacggccgtgaaaaagagctggaaaaccaggtggaacagctggaacaaaaggttacagaccttgaaaagaagaatacggagacagaaaataccgaaacagaatcggcagataagccgggggagagcacatcagaaacgcaatccggtgcggagccccaggtaacgccggaattgccctccctggaagaactgacgcagtcggtcagcgctgcggcagaaaaagtgaaggctgcaaagcctgccggaacaaaggaggagcagctcgcccaataccgggaactgaaaaaggagattgacgccttagatcgcaatctggatgactgggatgatactgttgaggctcagtacgaacagggagccatgacacgtgaggaataccgggcaaaagaccgggagatagattcccttgaggatcagctggatgagagtgaagaacagctggaatatctctttggtattgatgactaggcgctgaacgtaaaacttccaaatatagggatgcatttatttcttaaatttcagtaaagaatccaacctttttccaatcgtagtccgacgaaaatctgaaaacgaactgataaaatataaaatagtacaaaatggactgcgatctgtccgctggctgctgccagtttacagataaatagcctttgctgcagacagaagaaagcagggagtgtctcagcaaagaggaaaaaggaggaaaacatgaagaaggcaaaacgagcgatcgcctggatgctttcggtgattatgactgtgggctgctgcattcctgcaggagctgcaccgaatgagctggaaggcggtgcaaaaccaacaccactggcctggtatcccctcacagaggatgtcggtgattacagcggaaacgattttaacggagaacttgtgggcggggccactgtgggggaagacggcctgtatcttccggggggaggtaaacggcgcgactatgtaaagctgccgggagagatctttcagggagaggataatctgacgatatctgtatggctgaagagtaatacagataaggggaattatgcagcgctatttttcgggacaccggcaaacgccaacagcgttcccaccaattattggctgttcaacccaacaaacccaaacaatctctttaaatctgtgtttacagattccgacaatgagacaaagccatgggagacagaagcgggagtagcggcacatgatacttcggtctataagaataagtgggtgcactacaccacagtactgacgcctgactcagtggaaggatatgtgaacggcagactgataggaactgcagagaagacgaagacagtcgctgaattcggggatgtgctggaagcatacatcgggtgttcaaactatctgaatgacccggactattccggaaccttccaggatctccgtgtctacggggaagccttggatgctcagggcgtggcggatgtctatcaagacacagaaacagttacagagcccattattgacagcctgctggaggatgccaaaggccagctggatctgggagaactcagcgcagtgactcataatctggaacttccttctgagggcgccaatggaacagcaatcgcttgggagacatctgaccctaccgtgatcagtacgaccggtgaagtatttctgggagatgaggcaaaagacgccatactgacagcaaccctgtcaatcggcgggcggtcagtccaaagggagtttccggtacacacccttccccagagcgaagtgtccggatatatactgggcaagctgagtctgccctataccatttccgaacacactgttcttccagaatccattgagggaagagctattacctggaccagtgacaatcaggccattcttggtgatgacggagttctccacgggccggaatccggctttgaaaaagtaacgctcactgcccagatcgacctgggagcagagggcatacagtccaaacagtttcaggtacaggtggcggaaacaggggcttctctggcggcaggctacacaagaagtacgagcaacaaagaaatcggaaaaagcatgcatcttgctctgagcgcggatggttcggcctacgaagcactgcacaacaacatggggttgctttttgccaaaacatacaatgtagatgcagagggggatgaatccaagattctctcagaaccttatatcttccgtatgccggacggcacctttggcattgtggctgtgagagcacagacctcaggcacagatgcggaggatgcaggaaaattattgttctgcacatcagaggacttaattgattaccgggaaattggtatgattgatctgaaaacagaagggctcatcaaagcaccagcctgtgaatacgacggggcaaaggatcaataccgcattacctggaagggggaagatggtaatacatacagcaataccataggggatctgaacagtttatcctgtgatgacacaccgaaggagagcattgcggcggataaagcaagtgcagaccttggcattcctaatgcagaatccgggaatgtgattcctgtcacaaaggcagaggcagagcgtctgcagaaccgtcttggagaaattgttaatactggtgtctccctgaatcaggaacagattaccaccagcaccggggaagcagctgacctatctggtattaaggccagccttacctacagtgacggacagaccttccagcgttctgttgattgggatacaacagatgtgaactggaatcagccgggtacttatacggttaagggcaccattcgccagtccgatatggactttccggtaattcaggaacgggcagatcctaatattttacattacaatggtaagtattatttcattgccacagatgaaaaagggcaggacaaactgtatatccgcagcggaaaaacagtcagtgagctgaagaatgctcaggatcatttaatcctgaacaaaaccggcggcggtgatatgtccgggtgcctgtgggcgccggaactgcatgtggtaaatggggaactgtatatattctttgctgcatctaccaatggagcctgggatgcggtgcagtgcagactgatgaaattaaaaacaccggatgcagatcccaccaatgcggacaactgggaggctccggtacgggtagtcagaaaggatggaagtgccctgtacagtgagggaattacactggatatgacttacatagaggagaacggtgtttcctatgtagtatgggcagagcgccggattaatcctacatggtcctctaatattatgattgctacgatcgatccggaaaaaccataccagctcaccagcgatccggtaaggctatgcgctccggattatggatgggacagaaataccacaccggtggatgaaggaccgtttgcgatacgaaataaagacggacagctttttatcaccttttcaggagcgggagtaaatccttcctactgtgtcggtatgcttgcctgcaccaatgccgatgatatgctgaatccggacagctggcagaagagcaattatcctcttcttctgtcggaatccgtacccggagaatatggtcccgggcacaactcttattacgtgaatgaggacggcaattatgtaaatgtataccatgcacttccccagaacagcggaggaaaacgtcatgcgggcatccgtgaagtttactggtctgtagacggaacgcctgtgctggatatgaccgcagatgaggccgtgcttccggagaacaaagaagtttctgtagaggtagttgtggaaggtgagcctgtcgttgacgaaaaggaattgattctgaactatgatttttcaagcgtggaaggcaatatcgtcaaggatatgtccggaaaaggaaatgacggagagattaaaggaaaaggggccgcggttgaaaatggaacgctgacacttcccggaggggcagcaggaagcagtgccggatatgtacagcttcctaccggtatgttcgacaaccaggatactctgacaatttcagtatggctgaaaaatcagaccggaaagggaaattatgctgctatgttcttcggaacaacagagagccttcctctccagtactggctgctgaatccctgcaatccaagcggaagaatgaaatccgtagtaaccaacagtgtgaatgccggccagccatatatgacagagtatggattctctccaacggatggaaagaatggtgcaaacggtcctgtgacggatgactcctggggcctctatacaacagtaatccagcctggatttatcaccgcatattttaacggtgaaaaagttggctctgtgaaaacagcgagaaatataagtgattttggggaggaactggtagcttatattggacgttcttcctataatgacatgttttacaaaggccaggtgcgcaacgttaaggtttctgctgatgtctggactcaggatgatataagcaaggaatacggaaaaggtctggcggaactggacgcactgacacttcagatggacaagaccacggttgtggatgacattgcgcttattacagagggtgcatatggttcctcgatttcatgggcttcttcggatgaaaatgtgatcgctaaggacggaacagtaacccgccctgccaaaggaaaaggcgatgccaagatcactttgacagcaacggttactaacctggaacagagtgtaacaaaagaatttgtcattacagtattagaaaatgatccttccaaggatctgatgctaaaagcacaagaaattgatctgaatacgtactttgtaacctctaatgtgaaacttcccgcagacattgacggcatccctatcacatggagctcaagcagcgagcttattaaaaaggacgggacggttaccaggccagaggcaggaaaaggcagccaggaagttactcttaccgcaaccctgacccagaatcaggcaagtgcaaaaagggagttcaagctggtagttgtagagaagtacagctccctgctcacctatgtgacaacaggaaatacccagcgctccgacgcgttgttcctggcagctttgaaggatggaacgtatgaggcattaaataacgggaaagccattttgtatggaaacggcggtacccagatggggtctccaagcctgttcagaaaggcagacggaacctatggattaattgcatcggtcaacaacgacagcagttcggtgctgatctatgagtccggggatctgattagctttaccaatgagaagcaggcagagctggcacccggcaagaaagtgaaaaatccggtatgtatctatgatggttcaacagaaacatataagatctactgggatggaagcgatggaaaatcctatgtgacaggtaccaaagactttactgtatttggtgagacaaaagaagcggctaaaccggacagcttatttggaattactcagactctgccggggaatgcagtaaaaggggagtctaatgcttttgaggtaacaaaggcagaatacgatgcagtgacaaagaaatacagcagaattaagaataccggaatcagctctgtggatggggtgacggtagagaaaggcggagatattgaactgccctctaaggtaaccgcttcttacagtgacggatcctcaaaggatatggctgttgaatgggataccggcagtgtaaaactgaatgaaccgggtacttatcaggtgacaggagaagtagcccagacggaatatttcaatcctcttattgaggagcgcgccgatccgtgtgttacttacgatgaagaaaatgactgctactatttcaccgcttcttatccaacccgaaaagtaaacgatccggagggatatgacaggattgtgctgagaacggcaaagaccatcaatggattaaaggatgcggaagagatcgtcatctgggatgaaaaagatcatcctcagggaagatacatctgggcgccggagattcataagattggggatacctggtgtgtgctgtttaccgcgagcctggtggagaataatgtatggaatctgaagccgcatattataacctgtgaaggcacggcagaaggcggagtgatgaaccctgacaattggggggaagcgcagagagtggatctggtagaaggagatcaggactatcagggattgtctattgatatgacatactttgagacaaacggacagagctactatgcatggtccgagaaaccgggatctgcaaatatttacattgccacagtagatccttccaatcccagcaagctaaccagcaaaaaggttatgctttcctctcctgactttgcatgggaatggaacgccggacagtatattaacgaaggtccggcagtgatacaaaatgacggtaaggtttatctgtgcttctcaggagctactgtggatgataagtactgcgtaggcatgctgagcgcagacgcttcttctgatcttctggatcaggaaagctggacgaagaatccatacccaatctttacaacctcagactgtgaagtgttcggcaatgatgatctgggcaatacacaggtaggacctggccacaattcctttaccgtggatcaggcaggaaatcctgttattgtatatcatgcccgtaccaaagggcagaagttaggccctggagacggcggattagatgatccgggacgtcatgcgagagcaaaatcagttaactttgcggcagacgggacaccggtactctatatgacagcagaggaagagcttgcaccagaaaaccgtaccattacaacaacagtaacggtaagtggtgacgtggaagaaccggtagaaatcaagataacacccgcagaggcagtgatacccgcagagagcagtctgcctctgaccgtggcaggcaattatgaaggagaactcacatggagttcctcaaacagcagaattgctgtagtggatcagaacggtgtggttaccggtgtgagagtgggaaccgcaactgtcacagcagaggacagcaagggaaatcagggtagtgcaaagattaccgtgacgaaaaagctgcagcctcactgggtggcagagaatggcaagtggaaatacagcaacggtgacggcacatatgctgagaactgctggagacagatccgtggccagtggtaccattttgatggagaaggatatatgcagaccggctggatcctggacggcggcaagtggtattatcttaacagggatggcatcatggaaactggctggatcctggacggcagcaagtggtattatctgagagagaatggtgtgatggcaacgggctggctgtcagaagggaatacctggtactatctgaaggccaacggagcaatggcgacgggctggctgctggacggaaagacctggtactatctgaaagctaacggagcgatggcgacgggctggctgctggacggaaagacctggtactatctgaaagctaacggagcgatggcgacgggctggctgctggatggaaagacctggtactatctgaagagcagcggggctatggttacgggctggctgctggacggaaaaacctggtactacttgaacagcaacggctcaatggctaccggctggattcaggtcagcggaaaatggtattacttaaaagataacggagcaatggctgcaaatacctggattggcaagtattatgtgaatagttcaggcgtatggactaagacaaaatagcctagctgaataatgaagaagagattcccccatagggcaggcatatgcctgctgtatgggggaatttgtataaattttaacccccggggaggcttgagaaacatcttgcggtgtagtatccttaaaccagccaggataacagagagaaaatagaattcactggcgggggaccatggggcgatggtaccccgctgcctccaccaaaaaggatgagtatacatggaagacagaaaagaggataagattacaggatatgacaaagccatcgttcatcggttatctaaggtcatcggccacatgaagtctatacgcactatggttgaaacgggaagagactgcagtgaggtcctcattcagctttctgcagtaaagtcagcagtgaataataccggcaaggaaattttaaaaacctatatcactcagagcgtaaggaatgctgttgacggagaggaacgggactccatccataaattgaataaatcgatagatagttttatgaagtagaagggtttaagtaaatattaaaaaagggtgcttgggagcgaagatatatttgctctgaagcatccttttttatgtgagacgaaacaaaaaaacttctttgtacggatacccgctggggcatatcaggcagatggggccggtgcaggtgaaaaggttagataacggaactgtgtttcacttattaatgaaaaaaatatacaatcaatatcttgacacatgtaatatgttttcaatggattccagttaataccagcaataaatgaaatattctttgtaaaaatgcacaaaaaaataattgcaacttgaaaactatttacaaaataaaataaaactattgaaaaatattttcatttgtgatatagtctttataaataaaaacgaagtaaaagtaaggaaatagtaaggcttagatatgtcacagtttgtgtttctgacaaaagtgaaattccacgggagggataagaatgagcgtaatagaaaccgtgaccggacagtcagatgtaagagatgcagggcactgccagccccatgagcatgtgtacatcacgcagaccccggcactgcttacaaatccggaattgcggctcaacaatctggctgcgtccataaacgaactaaagctttataaagaggcgggagggaacactttagtagatgcaaacccacttgccacgggaagggatgcccttgccctgaaaacagcctcagaggtttccggagtacagatcattgcgtgtacaggctatcatatccctgtgttttatactaaggaccactggatatgggatactccggaagaaaaactagaggatatattcgtaagggaattaacagagggaatgtttctgggcggatgctatggctggccttcttaccagacagatattaaagccggtcttgtaaaggcaatgctgacacaagaaggggtaagaggaagaaccagagtccttttaagggcggcaggtcgtgcggcagcaagaacaggaacttctctcatgctccacacagaatatgggaaaggcgctctggaggctatacagtatttgactgatctgggacttgcaccggaacggattcttatatgccatgcagacaggcaggtaaaggatctggacatacatgaaaagatagcttcaaccggagtgtttatggaatatgataccataaccctatttgaatttcatgataacgaaacggaaatccggatgcttaaacacatggtgggcaggggctttttagaccagatattgatttccacagatcccactgcagatcggctgaaatcatacggcggcagatatggaatggactatattctaaagacatttattcccagattaaaggaatgtggctttacggaggaggaaatacgccggattacacgggaaaatccggggagagcccttggaagataacgagttaacttagtattaactaattaaaaagtatatggaggaaaagctatgaagagaaaggttgcatttttgttatgcgcagtgctgacagtgtcagctgtttttaccggatgtggaagttcaaatggagattcagagggagacagtaagagcgcatcaaaagaatccggaggtacgaaatgggcatccacggatgagacatttaatcccctcgaagaggaggatgccattacttttgaagagctaagggaaaaagcgggagatattgcggcatcagacaaagaattcagttttgcgggaaatgtaaaagcgtttgaaaatgtagtgtggcaggaaatagctaacgggtatgaaggatttgcaaaggacgcagaaacggcaggcaggaagcttacagtagacaccacatcccctatgggagaggatgatgaagaagggcagctctctatcctgaaggatcaggtgaggcagggtgtgaatgctgtgcttttatcacctatttctgacgctaactgccttccggggatcgaggcggcccatgatgcggatatcccggtatttgcagtgaataatgaatttaatggcgcagacatgtttgtgggacccaattccctggaacagggacagatcgcggcagaatgggtaaacgagaaaataggcggaaaaggagaagtcgcaatcgtcatggggatggcgaaaacaggtgtgacgagaaacagaacggaaggatttgaaggctggtttaaagagaacaataaggacgtcgaggttgttgccaagcaaaatgctgactgggaccgctccaaggcaaaggatgtagcggctacctttctgaagacatacccagagctgaaagcaattttctgcaataatgatgtcatggcccttggggtcgttgaagcggtgaaagaggcaaatctggagctgaataaggatatctatgtagttgggtgcgacggacagtcagaagcatacgactccatccgtgcgggagagatggcggcgacaattgattctttcccatactatgagggatatatggcagctgaagtttgttatcgctggatgatcggacaagatgtgccgcgtgttgtatttacacccagtaagatgctggattctgagaatgtagataacacagcagaagaaaatctgggatgggaaaatccggtatttgaataaaaggggctggctgtctgccggtgctgttatgcccggcagggctgcctttggctgcatcttccagaggcggccgaatcagaaaggagcagtgttttgtgagtgatacgatgattcgttttgataatatacagaaaaggtttcccggggtttatgctttaaaaggagtgtcattctcggtaaaaaaaggggaggtacatgcacttctcggggaaaacggagcaggaaaatcgacactgctgaatattctccacggtgtctttactgctacagacggagacgtttatataggggaagagaaagtgaactttgagacccctgtcgaggcgctgaagtatggaattgcaaaggtacatcaggagatacatatggtagaatgtctgtccgtaggacagaatatcgcactggggtttgaaatgcagaagcacgggatgctggattatcaggacatttacagaaaaacagatgaaatactaaaacagctgggctgcaggttcaaaagtaaagacagcatcagcgggctgagtgtgggggaactccagatgatagccatagccaaatcgctttatcataatgcaaagattatatcgtttgatgagcctacggcatctctttctaatgcagagacagagaaattgtttgcaattattgaagacttaaagaaaaaaggaattacaatactgtatatcagccataaactggatgagatcttccgcattgccgatcgggcaacgatcctgcgggatgggacttatatcatgacaacaaaggtagcggacatcacaaaggaagaattgattaaaaatatggttgggcgtgatgtttccagctatgctgtacgactgaaaccatcctgtgtgcaggaggaggttgtgctggatgttcggaaactctgtgggaatggtttcagtgatatcagcttcgtacttcacaaaggcgaaatccttggcgtttcaggcctggtgggcgccaaacgcacggaagtcatgagggctgttttcggaatagataaaaaaataagcggggaggttttcgtacatgggaaaccgacagatataaaatctcctcaggatgcacttaaaaatggaattggcctgatatcggaaaatagaaagagtgagggttttgtcccggttatgagcaatgccatgaatatggggctggcagcccttccttctttttataaggggatcggtttagataaacaacttatttataagagctttgaaacctatggtaataaggtacagctcaacattatggacccggagcatctgacacagaatttgtcaggcggaaatcagcagaaggtaatcctggcaaaatggctggcaacaagtgtagatatccttattttcgatgagccgaccaagggagtggatgtgggtgcaaaggctgagatatatgctttgatggaagaatttgtggcggaaggaaaatcgattattatgatttcttcggagcttcctgaggtcattgggatgagtgacagaattattgtattaaaggaagggcgcatgtcggctcaggtaaacagggacgagttcagtgaaactgtattgctgggacatgcgataggtgagtagtgagatggaaaagttgagaaaagtcatgaagtcatatacgcgggaattatccactttgctggcacttatgattattattgtgatattttctgccatagctccaagatatctagagatcagcaacttgatggatattgtggagcaggggacggtaaacggatttcttgcaatcggtgttacctgcgctattatcacgggaggcattgacctgtcggtgggttctgccatggcggtcagtattgtcacatgcggcaggcttgccgtggcgggagtaccgcctctggctgttgtagtcataggcctggggctcggggcattaatcggaacaatcaacggtctgcttgtcacaaaaatgaaattgcagccatttattgccacaatgggaacaaacagtgttctcaggggaattgcctacttaattaccggtggctggccagtgctgaatattccgaaggaattccgtcagatattccagtattcgatagtgccgaatctgagaatgtcaatgatcgtacttgtgctgatggcagtggtatattcatttattctcaagaaaagaaaaactggtgtgtacatatatgcaattgggtcaaatgaagaggcaacgaagctttccggtgtgaacacagataaatttaagattatggcatacatgctatgcagtatgggcgcggcaatggccggtatggtaacgcttgcccggctgggaacaggggagcctacaggcggcgagggatacgaactgaatgcaatcgcggctgcggcaatcggaggcaccagtctggcaggaggaaagggaagcatactggggacagttctgggtgctctgattctctcggcacttaaaatcggactggtagtggtaggcatggacaccttctatcagtatattgcaaccggattgattattatcgtagctgtatatcttgaagttgtacagcagaaagtttcgggaattttttcaaagaaaaagaaagctgcacaaagagcttaaataaagaaagggtgtgactgatgagtcgcacccttttttttctgacaccaagatcttgttctgcggtgtgctgaattgggaaggcggacacccccggatggggatagggacaggaaaaaaggtcctcaaaagccccggaaaaagcgtcagaaaaaaagtgtatttatcacccataggggggcttgcaaagaaaaataccaggatttatgctgtgcatatgccaattgtgaaatagacggcacaggactggcaatacgcaaggaggagactatgggactggatcatgtaataaaggtaattggtgactattgggatgaacattcttctgaatttgataaggagcatgacacggaagacagcaaggcgtgggaaaccactttatcagagcttataggaaaggataccaataaaagtatagtggatttgggaactggaacaggatttctggcaaatatgactgcccggctgggctatcccaccgtgggcatagacctgtccagggagatgatgaaatatgctgtccgtcatggaaagaaatgcggttccccggctgtgtacatggagggaagtgcactggaactgccgtttatggaagattctgtggattacataataaacgcgcgtctgctctggactctgatagagcccaaaaaggccctgaaagagtggtaccgggtaatccgtccgggaggaaaggtaatgtgttttaaccggatgcaggatggagttggactcactgtctggaaagataatatttatcaggacagggaaacagaccgcagtttggaaataatgagtgccgggatggaggagctgcgggaattggtggagaacagcggttttgcagaagtggaaatcagaaagttgccggggcttacaagacctggatacgactatgagccgtggtttgtgcttatggggactaagcattgattggagacttgaaagaataatctaagaattcaggaggagtttatgaattacaaaggaataacaaaggtgttggcagcagggctgtgcatagctatgctggcaggatgcggtgacaacaaatcaacagaaccgaaaactgacacagatgcttcccgggagacaggtaaggaagaggccaaagacagtgcttcggataagaaggtgcttcgcctggcatttccttccaccattacgtctctcgacgtaatggatggagacggcgctactatgctgaaagaagtagcgggtgtcattgagactttagtgaacgtagattctaattttgagcttcagccctctcttgccacagagtgggagcgcacaggagataagacctgggtattcaaattgagggatgatgttacatttcatgacggaacctcatttaatgcggaagcagttaaatggtgtctggacagaagtttgaaggataacgagtctctcagacaaacaacagggattgacaccgtggaggttatagacgactatacagtgcagtttgctatgactgagcctaccggtgaacttccggaggcatttacgaatgtaggtacggccattgtagcaaaatcatctgtaaacgatgcaggagaattcgtgacagccgtaggaaccgggtattttaaacaggagagctttgatgttggttccggtacatttacctgtgtcccttatgacggatattataaagacgtcaaaaccaatgtaacagaacgaaagatagtgagcatagcggatgccagcacccgctctctctctgcccagaatcatgagatagatgtcgccacagatgttcccttcagtgatttggagacgctgaaggatgcggataggatacaggtgcagcagtttaacaccgccaggacctatttttattcctataatgtgaataaagagtatctgaaagatgcaaatgtgaggaaagctttgatctatgccatcaacagagatgagttggtgaaagacgtattgctgggagtaggcgcagtaccagagggtatatttatcaaagatatgccatgggccaacacaggagtagacaattatgattacgatgctgagaaagcaaaagctatgctggaggcagcagggtataaggacagtgacggagacggaatcctggataaaaatggggaaaaactgtcgctgaatatagtaactggttcccgccgcccgggaaacgcgctgattgcccaggcaacccagggatattttgagaacatcggggttgaggctgccgtagaggtgctggacggaaatgcatacaatgaagtgattgaaaagggcagctttgatctctgtctgaattcagcggcaactggctatgtgccatctgcttcctactacctggaaacctattatcattccaaaagcagcaatgggaagaacatcggatactctaatccggaacttgacaggctgatagaacagtgcaaggctgccgacagaggagaggaaaaaaatgagctgagcaggaaagcccaggcaatcgctcaggaagatgcagttgtctacacggtagcagactatggtgcggtttttgtactttcggatgcggttgagaacttctcgtacagcgctgcggtgcatgattttatcgttccgaatgaagttagtttaaaatagatagtaaaagggggctgataaaaagctcccttctttattataaagaacaggaggaacacaatggcaaaatacatagtaaaaagattgggcgttgtatttatcgtgctgtggctggtatctactttgacttattttatggtgcacgttaccccgggagacacagcgaaagcaattattgtctccgtatacggggaagatgcagtatcagaagagacccttgagcgggtaagagataaatttgatttgaacaggcctgtatatgtgcagtatctggagtggctgaaggatgtggcgacaggaaatctgggaacatcctataaatatgataaaccagtgcttcagatgctggccgtcagagttttgaataccattgtgctggggggagcggcatttcttctctctgtaatcattgcactgcccataggaatactcagcgttattcgtcataatggtattctggatcatggagtcaggggatttgtactattgacttcctccttcccatccttttggattgcactgattttaattatcatattttctattcggctgaaattgctgcctgtaagcggaatgacaggggcggccagcatcgttttgcctgctgtgaccttatctgttggcatggttgcaacaacaaccagaatgatgcggtccagtatgctggatgtactgggacaggattatatcacggtggcaaaactcaagggattaaaaccggggaaaatagtatggggacatgccatccgcaatgcaattccccctattgtaaccgttctagggctacagattggccatattcttggaggcgccgttattgtagaaaatattttttcctggccggggatcggcgctttgtttattgatgcggtaaacgctaaggacttgcctatgatagaaggatgcgtccttttgattacttttggatatgccatagtgaatgtaattgtagatatcatatatgcatgtatcgatcccagggtgagatatacgggaggagagagagcatgagacaaattcggagttttttcaatatgctgacccgtaaaaatataattttgattttaggtattatcatcaccggatgtatgtttgtgatcgtaatcttcgcaccctatctggagatgtatgatcctacaaagatgtctcttggagataaattcattcctccctgcagagaacattggtttggtaccgaccatatggggagagatatactaagcagggtcattgaaggatcccgggtatctctgacaacagctgtggcagtagtgcttgtaagcgcagcgctggggacgggaatcggattggtatcaggatttttcggcggttttatggatatgatactgatgaggctggtagatgtactgctggcatttcccaccattgtatttgcgctggcgatatcaactctgctgggtacaggtcaggggaatctgattctagcgatctgctgtgtccagtgggtgaggtatgcaagaatcgcaagaggtgaggcaattctattaaagaatgcggaatatattgaggctgcaaaagccataggaagcagtaatctgcagttgctggcaaaatactttttccccaatgttatttctaaaatcctaattatggtttccctggatattggcagtattatcttatattgtgcgtcattaagctttttgggactgggggcccagcctccttcgccggactggggggtaatgataagcgacggaaagaattatatgcagtatgctccctggatgacactgtttccgggacttgctattgcagtctcggccctcggatttaatatgatgggggacggtatcagggatctgctggatcccagaatgagagagtcagtgcagtcggagtgaggaggatgaaatgaaggatttattacaggttaaggatctgaatgtaggatttctggtagagaagagagaggttcaggtactgagaaatgtttccttttctattggagagggagagattctgggagtaatcggagagaccggatgtggaaagtctgtgacaggaagtgcggttctccggctgcttcccgaaaatgccctggtaaaaggcgagatattgtataaagggaaagaaattttatatatgggggaggaaaactaccgtgaactcaggggaaaagagatttctgcaattccccaaagtcccggtacctctctgaatcctatgatgagggttggaaaccaggtggctgaatgcatcacgggaaaagaaaaaagaaaaagcgtccgtactgctgtatatgatattttcaggtgtctgcagcttcccggaaaggacagatgctacggaaattacccgtgggaactgagcggaggtatgtgccagcgggtgctgattggcatgggaatgataacacatgcccgcctgctgattgttgacgagcctacgaaagccatagactgggctctccggaaagaggttgcggatatcctgctgaggttaaaacaggaaatggggtgtgctatgatgatgattacccatgatattggggtggcaagttatgtggcagatcgtgtggcggtcatgtactgtggtgagatcgtagaagtaggcaaaacagaagacattctgcatcatccaatccacccatataccagaggtcttatccgggctatgcctgccaatggatttgaggtaatggaagggttcatgccttctttttcagaactgcccgagggatgtaaattctgtacaagatgcaggtacagagatgcagtgtgcagccactctcaggagatggaggaggcggataccggacactgggtgagatgccgccgctggggagagataataaaaagcagggaggaacagctatgctcttagaagtaaaccacgtaagcaaagagtaccggtcaggcgtcatccgcacccggacagtccatgcggtgcaggatgtgtgctttgaaatgaaaaagggtgagattttcggactgatcggcggaagcggctgcggcaaaactaccattacaaaaatgatcctgggattattaaaaccatcagagggaagcattctgtttgagggcagagatcttacaaaactgagaaaaaaagagtggaaggaggtacacagagacatccaggttgtgttccagcatccccagatgacatttaatccaagagggaccatccggttcgcctgtaccgaaccggcgtccaattacggtctggtgaaaaccaggggggagagggatcgtctggcggaggaattaatggagcaggttggactcaccagggaccagcttaagaaatatccccatgaaatcagcggaggacaggctcagagactctctattatcagagcactgtcactaaatccgaaattattaatctgcgatgaacctacatcgatgctggatgtgtctgtacaggcgcagattctcagtttgctgaaaagcaaacaccgggaacaggggcttgccatgctgtttatctctcatgatttggaggtggtacagtctttttgcagcagggtggctgtgatgaataacggaaagatcgttgaatcaggggctgtaaaggatgtgttttctaatccgcagcatgtatatacaaagaaactgctgcgatcttatatgcactgttaaatacgccgtaagagtgtgagtcagaacttggaaatgggctgccggtgagggaaggcattggctgattagtaaaatagattttcccttgtgtattctgccggatcccattataatgaagaatagtacgattaattgaaagaaggtgaagctgtggttgaattagatcaattcaaatatacattgaatacgtacgcagaaccattagtggaagtgggggattcactttgacttggctaacaaggaaaagcggattcaggaattagaaagagaaatggaagctcccggcttctgggatgacacagagcgctcccagaagatgatgaaggaattaaagggaatgaaagatgatatggacacgtatcatcgtctgaaaacccaaatggaagacatggaactgatgatcgagatgggatatgaggaaaatgatcccgcggttatcccggagattcaggaaatgctggaagagttcacaagggattttgaagatattcggattaagattcttctgtcaggggagtatgataagaatgatgccattgtaacgctccatgcaggcgcagggggaaccgagtcctgtgactgggccggcatgctgtaccggatgtatggaaaatgggcagataagcatggatttactacagaggtcattgactatctggacggcgatgaggccgggattaagtcggtaacctttgaggtaagagggatcaatgcctatggatatctgaaatcggaaaaaggggtccaccgactggtgcggatctctccttttaatgcagcggggaaacgccagacgtctttcgtgtcctgcgatgtgatgccggacattgatgaagatattgatattgagattcgtgacgaggatctaagaatcgacacctaccgatccagcggcgccggaggacagcatattaataagacgtcttcggccatccggatcacccatctgcctaccaatattgtagtgcagtgtcagaatgagcgctcccagcatatgaacaaagataaggccatgcagatgttaaaagcaaagctctatcttttaaaacagcaggaaaatgaagaaaagctttccggcatcagaggagaggtgtcagagattggctggggaaatcagattcgttcctatgtgatgcagccgtatactatggtcaaggatcacaggaccagcgcggaaacaggcaatgtggatgctgttatggacggggatttggatttatttatcaatgcatatctcaaatggataaccctttccaaaaaagacttgcagaactaagcagtttatgctaatatcttttgtggaaaaacaaatgtatttcgtgaacgaacaaggtgatagacatgtctgaaaaaagtaagtactttgtaataaaagagaaggctgtgccggaggtactggcaaaggtggtagaggctaagcggctgctggattccaaaaaggggatgactgtgcaggaagctacagagcaggttggaatcagcagaagctctttttataaatacaaggatgatattttcccctttcatgagaatgccagaggtaagaccattacctttattattcagatggatgatgaacccggtctgctctctgaagtgctgcaggccattgccgagaatcacggaaatattctgacgatacatcagagtatccccatcaatggaatcgccagtctgacgttaagtgtggatattctccccaacaggggagacgcggaagctatggtggatgatatcgaagcatgtcagggtgtacattatttaaaaatactaggcagggagtgaaaaaacgatgattaatatcgcagtgttagggtatggaacggttggttccggagttgtggaggttatcaggacgaaccacaccagtattaataaaaaagccggtgagtatattaatattaaatatgttctggatttgagagactttccgggggatccggtggaggaagttctggtacatgattttgagactattataaacgatccggagatacaaatcgtagtagaagttatgggcggagtggaaccggcatatacctttacaaaaagggcgctggaagccggaaagagcgtatgtacttccaataaagagttagtggcaaagcatggggtagagctccttgcgatagcgaaagaaagggatatcaattatctctttgaggcaagctgcggcggcggaattcctattatacgtcccctgaattcttctttaacagcggacgaaatagatgagatcactggtatcttaaacggtactacaaactatatcttgtcccagatggcagaaaatgggtctgattttgatgaagtattaaaggatgcccaggacaagggatacgcagagcgcaaccctgaggcggatgtggaaggctatgatgcctgccgtaagattgctattctttcttctctggccttcggggatcatgtggactatgaggatatttatacagaaggtattactaagataacagctacagatatcaagtatgccaaggttatgggcaccagcattaagctgctggccaccagcaaaaaggtgggagacaagttctatgccatggtatctcctgttatgattgaccgcaaaagtccgctttacagtgtgaatgatgtatttaatgctatttttgtgcacggcaatgtgctgggagatgccatgttctatggcagcggcgccggcaaacttcccactgccagtgcagtggtggcggatgtggtagactgtgcaaagcatcttcacagaaatattatgatgagctggagcagcaagaagttagatcttatggatgtggaagaagtaaagaaccgtttctttgtccgggtgaaaggaagcatgaccggtgatatctctaaggtggaagaagtattcggaaatgtacagccctatggagtggcagatgtggcagatgagttcggattcctgacggaagagatgacagagaaagagttcagggagaaagctgcccgcgtggaaggcgtgatcagcagaatcagagcaagagtataggagtaaaatcatgaaatatatagtggtgttaggcgatggtatggccgatgaaccattggaggcgctcggccttaaaacgccgctggagtatgccgacacgaaagccatggacgcaatgtcaaaaaaggctgagatcggcctggtacataccataccggaagggatgactcccggcagtgatacggcaaatctttccgtgctgggttatgatcccaagatctattattccggccgttctcccctggaggcacttagcatcggtgtggatatgaagcccgatgatgtggctcttagatgtaatattgtaaccataaccgaagaggataagccctatgaggagcagagaattatggatcacagctccggggaaatcagtaccgcggatgctaaaatcctgctggaggctgtaaccagcgagctttcagatgagatttaccaattttatctgggaaccagctaccgtcactgtctgatctgggctaagggaagcgtggtgcctctgacccctccccatgatgtactgacccaagtgatagggcagtatcttcctcaggacgagaagcttcgctacatgcagaaaaggagctatgagattttaaaggaccatccagtgaatctggaacgaaaggcgaaaggattgaacccagctaatagtttctggttctggggcgcaggcacccgtccggccttgtcgtcttttgaggataaataccacaaaaagggtgttatgatttccgcggttgatctgctaaagggtattgccgcaggagcgggtatgcataatatatcggtagagggcgccaacggagggcttcatactaattacgaagggaaggcccaggcagcagtggatgcactgacaaaggacggatatgattttgcatatatccatgtggaggcacccgatgagatggggcaccagggaagtgtagagagaaaggtacaggctattgaatatctggacaagagagtgattcagtatgtgaaagatcgtatggatgcttcgggggaagactatcgtatgatggtacttccggatcatcccactccaatctgtgtgagaactcatacagggaatccagtgccgtatatgctctatgacagtacaaagcttcaggataatgcctggaactacaatgaaaaagaagccggagccagcggcaatgttattgcccacggctatgagctgatggattatttgtttgccagataaatagggtgaaaagatatacctggctgcgatttgccgagagtaaatgcagccaggttttttgcagatattcataattggaggtaactatgctgattgttaaaaagttcggagggacctcggttgctgacaaagagaggatttttcatgtggcaggccggtgtgccgaagagtataaaaagggaaatgacgttgttgtagtgctttcggccatgggaaaatatacggatgaattgattgaaaaggccaaagacatcaatcccaatccacccaaaagagagatggatatgctgtttaccatcggtgaacaaatgtctgtgtctctcatggcaatggctatgaaccagctgggggttccggcggtgtctctcaacgcctttcaggttccaatgtataccaccagcaattacggcagcgccaggctgaaaagaattgacagcgatcgcatccgcaatgagttggaaaacaggcgaattgttattgtcaccggctttcagggagttaacaaatacaatgattataccactctgggcagagggggttcggataccacagcagttgcactggcagcggtactccacgcagatgcctgtgagatttatacagacgtagacggagtttacacggcagatccccgaatagtaaatacagccaggaaaatggcagagatcacttatgacgagatgctggatctggccactcttggagctggggtactgcacaaccgatccgtggaaatggcaaagaaatacggcgtgcctctggtggtacgctccagtctgaatgactcagagggtactgtgattaaggaggaagtaaaagtggaacgaatgctcatcaccggggtggccctggataaaaatgcagaccggatctcagttatcggcttaaaagacgaaccgggaatcgcatttaaattatttgatacactggcaaaaaagaacatcaatgtagatgtaattcttcaatccattggcaggaacaatacaaaagatatctcctttaccgtagcggataccgatctggaagaggcagtgcaggcaatccgtgaatccggaagatttgcttatgatgaagtaaaatataagacagatattgcaaagctctccgtagttggtgccgggatgatgtccaatcccggggtggcggcaaaaatgtttgagagcctgtataatgagggaattaacattaatatgatttccacctcagagatacgtgtaaccgtactcattgaagaaaaagatgcagagaaagctatgaatgcagtacatgatgcctttgggcttgccgaataagggacaggccggtctgattttgggacgtgttctttctagaaagaacacgtcccaaaatcacttcaaaaaagccgctcatcaaatgagcagcttttttattttatacaattatccaatattgttataatttccataattgttttcatattcagaatgtacctcctgaaccggttcgtcaagttctcctgtcacatccaggtagaaaaagacctgggttgccgtcatgtagggtactacccataaaagcccaatgtagcaggaaaatacagataataccagcattcccagaaagcttagttcaatgtacagcaggcgtcctctgtaccctttcagaagccttaagctttctttcagggagtcaagagctcctagttccggattatccagaagcataggaatagagaggaaaaacagcaatttcacaaatagattcaccagaccgcctgccagtgtagttcccagcataatcagattcagggagaggttggtcatccgctccggatgctgatagtaagtcatcaaggcagcatacaggggaacctgtacaatgaatcccggaatggactgtaaaaatgcagagataatgatcctgtccggatgatgggaaaaggcataggcaatatcccctgcgcgaaatggctggttcctgcacagattcaggtgaagcttaaaaaaaccggcggagaatacggagaggatcaaggagataacaatggtaaatatctgctccatcaccatggttgaaatgctgtagcccccaaaaagtgcggtagacagcatgtatagggagacggcgattaccgccagcagaagaaagccggccataggtgttccgtattttccattcagcgccattctggctgattgcttcaattgggcggatgttcttttcatagatgttacgacctttcctgtaggattaaatgttccatgttattatagcaataatatgccaaattaacaatatcactttccagtaaaaaaatatacaaaaataagaaaataattaaactttccctttataaaaaacagacggtataaaagcgggtaagatttcctacctttttaaaatcatagtcataagagaacctgactgtatttgttaaaatgaaagcaaagtatctcttttcagggacacttctgcccgtcaggacagagaaaaatcaaataagaacaggaggatgaagatgaggaaaaggaaactatctacgagcattaccgcgtggatactcagcgcaagcatgctgttttccatgatcccgcctacggttgtaagcgcggatccgggagggaatgacagtatcgtcagaacgttggcggcttcttatgacatgagccatgcagaaggtatgctgacagacaccagcggcaacgggatggatgcagagctggtaggctttacggacgacgactttggattcaacgaagaagatgggacagacgaggtacttaattttgcagctgacaaaagcaagtacgtgaaactcccagcggggataattacaggtgaaagcttttccattgaggcaacgttcaaaaccggcacagccgcaggacattggttatggtgccttggtacgaaggagaacacatggccgaatgtgaataattacgtatttttaaaccctatgcaggataacggcaccatccgcggaggtatgaaggatggggctacagaattgctgttcggcaatatgccttctttgacaccggatacttacagcacagtgcggatggattttgacaggggcaccatgcagctgtatgtggacggcgccaaggtgggagacgatatcgcaagcaattattctattcaggatatcctgaatgcgggaacaaatgagggagaagatttctgcggatatatcggaaaatcactttatacaccggataaagcatttgccggaactctgacggaatttagcgtgtactctccggttgagaacccggacagagacacagcggaggctgatgttaatgagcttacacttcctgaggtaattgagggagatatagagcttcctgtggcgggaacaaacgggagtgtaattacatggacctcaaaccgggaagatgtaatcagcacagacggtaccgttacccgccagccatttgataccaaggttctgctgacggcaaccgcagactgtaacggcaccacggcagagcgttcttttgaggtacttgtaaaggccagtgaggacaaagacgatagaaatctggtggcctcttatgatatgagccatcagggggatgcactgacagataccagcgggaatggaatggacgccaggcttgtgggtatgacagatgctgattttacagaagacagcggcccagtgctgaacttcactggtgacaaaaacaaatatgtggagcttcccaagggattaatccagggagaaacattttctgttgaggcgaccgttaagaccggcaagcaggcaaaccactggctgtggtgtctgggaacaaaggtcagcggaaccggaaacaactatgtgtttgtgaacccaatgcagggcggcggagccattcgtgccggcatcaagagcggatcagaaaagctgcttgcccagacggccaagcttacaccggatacttatgctaccgttcgtcttgattttgagaatggaaccatgcgccttctggtggatggagtggaagtggtcagtgggatggaaacgggatactctgtacagaagatactcacagacggtacaaatgcagaggaagacatctgcggatatatcggaaaatccctgtattctgcagatcctggatttaccggcgctctgaaaggctttaaggtatactctcccacaatggctgaggacaagctggcagcagctgatttggaaaaaatctctctgccggactccgtgtataaagatctggacctgccctctgttggcggcaacggaagcagcattatctggagctcagacaggaaagatttgatcactgatgccggagaggtttctccagcacagcaggatgcagaggtgattttaactgcaacggctgacctgaacggcgctactgcagaaaaaacgtttaccgtgaaggttgtcgggacggactctatattggaggaggccatgaattcactgacctttgcgtatacagagatctacgggaatattacacttcctacagagcttgcaaacggggcagctgttcagtggtctgtgaacgaagccggaaaagatctaattaccgtggaagatcagacatccgaaggcggaagaacaattcctgccggtgtggtaaccagaccggcaaaagacacggaaattcagcttaccgcagatgtttccgtgggcgacagtgcggacagtaaatcctttacgtttactgtaaaagcaaaacccgaagaaaaaggggaaaccgcagcatatctgtttgcgcatttcaccggatcggaaggcagaagcaccgacgaacagatatattttgccacaagcgagaacggaagccagtggacagatctcagagaaaatggaaaccctgtcctttcttctgatctgggagacaaaggtgtcagagatccctatctggtgcgttctcccgagggcgataagacgtacctgatcgccacagacctgagcatctatcacagaggcggctggggcaatgctgctgctactactaccggaagcaccagtctggtggtatgggaatcttctgatcttgtaaattggagcgaaccgcgtctggtggatgtggcatccaggattccgggtgcgggctgtgcatgggcgccggaagcattttatgatgaagagaccggccagtatgtagtttactgggctacggcatcgggtgagagcaatgaactgggtgatcccatgaatatgtattatgccactacccgtgacttctatacattctcagaacccgtgctttggattgacagagaacactccatcattgataccacaatgatccaagccaacggcaaatattaccgtgcatccggcgacggacagatcactattgaagaaagtgattctatatacgacggatggaaaatcatcggaaccttaaaggatatctttaacaataacaattacagcggggcaaagcttgaaggcccggaattctttaagtataacgacagagacttcctgacagacaaagacggaaacaaggttgacacctggggtcttatgtgtgatcagtatgccgagggaagaggctatctgccattccggacaacgaatatggcagacatgagtacagacagctggtctccggcatctgacgtaaatttcggatccctgaagaagcgccacggcaccattcttcccattacagaggaagaataccatgctgtccggaaagcctttgccaacattgagccccccacaggggataagaaggtactggcagactttacctttaacgatgaagaaacagggctctccagtgaaaacgcaaaagcagagggtacctatacactcaaagacagctatgacggcaaagcgctgtacctggacggatcagcatctaattatctgacggttacagacaaggacggaaagagcctgctgacaggggctcaggagcttacggtatcctatgatatgaaaccagacagaaccgagacaaattgggcgttctttgcagccccgaaaggaaatccggtttcttatatgaatgaaaaatatctgggcattttggaagcggggggcagcaccacagcagaacgttacaataattcgggaagcagacctgttaatccatatgcagacacaggctccggctggtaccatgtggatgttgtattcggcaaaacagatacttctgtctatgtaaacggtgtgaaacaggccggcgaagccagcagctatacactggaggggattctcggaaccagcagtatcctgcagataggaaaggcgaactggaacagcggtgaatatttcaaaggctggattgacaacttcagagtggctaattatactctgagcgatgaggagatcaaagccttagctgataatttactcagtaagctgccggcagtcaaggatgtactggtagggacagcacctgacagggagacggcccttgagtacagagggaccgatgatcatacggcaattctgacagaagtagatcaggagaatatgacagtgacatcctatatccggaagacagctgacagtaaaaaaactcctgttaccttttatttgaacaaagaagtagacgccatccttgtaaatggagagtcttttgaaaacgggacggctctggatctgtccgaggatgtgcaggtggttctgcagtcaggcggtacggaggaaatctggacgataaagaaacctgtgatcagtaataaccctgtattacccggtcagtatgcagacccggatctggatttctttgacggtaagttctggatcttcccaaccacagacggttatccctcctggagcggatatcagttccatgcgttctcttctccggatctggtaaattggacggatgaaggcgtcattatggatttgaaggaagataatcccggattaaatgagagcgggatacagattgcagcgtctaaatgggcagtgggaagtgcctgggcacctaccattgaagagaaaaatggaaaatattacttctattactgcggaaagcagttaaacggggagtctgccataggtgttgcagtagcagacagcccaaaaggcccttatgttgacaaaggggagcccctgatgacaaaagccatcagttcagagggcggagcagggatcggtcaggctattgatccgggcatctttaccgatgacgacggaaaatcctatctgctgtacggcaacggcggagcagggatcgtagagctgggcgatgatatgatgagtattaagaaggataccatccggaaactgaatggcctgacaaacttcagagaatctgtaaatgtaatcaaggtaaacggagtctatcactggacctggtcctgcgatgatgccaacagccctaattaccatgtagaatacggaacttccgatacactggacggttccattacaaaacacagtactctgcttgagaaggatacggaaaaaggaatccttggaagtgcccaccagtcctctattctttatatcagagacgaaaaaggacaggatcattactacatggcttaccacagattctatactccattgaatattttcacctcaggggatggtcttgggaagcacagggaaacctgtattgatgagatattctttgacaaaaacggctacatgactatgacgcccacgctggagggcgtgacggctgtaacccctgcgtctgacaatcctacggtgaagtatatcacagtaactccgggtatcaccattgtgggaaaaggaagtacacagtcctttgcagcagaaacaaaagaggaagctgacgcatccgttacatggaaggtggaagggaacagcagcagcagtacctcgatgacgccggagggtgttcttacagttggagcggatgagacggcaaagcagcttaccgtcacggcagcgtccaaagcaaatccgggcagaatcggaaccgcacaggtaaatgtagttgaattcttcggagaagcgctggaggagcagggggtcattactgccagaaacggtgcatctgtggaaaaagatgccgagagaggcaatgtacttagaattacgtccggatggatcgagggaggcaacagcccggcaaacggcggcggtgtttttgaaaaggcacaggcaatctttaaaaatacaaactttactctgggcatggatgtgaacattgacggacttgatgacaatacatccatggcgatgattggaaacagtgacaatcatttccgtattattccccagcggaaggataacaaagggtatttgaaggtatgtgcggcagggacagagacagaatacgaattatccgaaccagtgaagctgaacgaatggcagaacataaaaattatatacagtgaggatgatgccacaggaaaagtctcagtagtggcaggccagaagacactgataggcgcacaggagcttggctttaagctgagcgctctggacacagtagatgccagtctgggatgcacgtataagacaggattcctgcgcacaggaacttatgacaacattattgttacaagggatgaggaaccagaaataacggtaacaggaattcaggtcaaagccccggagaagacaaagtatctggtgggtgaagaactgaacaccgcaggtctggaggtgaccgccctgtacagtgacggaagcagcaaagatgtgaccggtgaatgtgagctgagcgggtttgattccaggataccgggacgtaaaactgtaacggtaagctatggaggatttgagtccacctttgatgttatcgtggagggtacccaggatgacagtttattggctgacttccactttaatgatgaagagaccggattgacaagcgaaaaggcaagagcaacgggcagctatacgttaaaagagagctatgacgaaaatggaaaggctctgtatctggatggttctgcctccaactatctgacagtgacagatcaagacggaaagagccttcttaccggtgcagaggaactaacgatctcctatgaagcaaaaccagatcgcacaacaacgaactgggtgatgttcgccgctcccaacggaaacaggcaggagtatgggaaagaaaaatatattggtatccttacaaataacggcacaacaactgctgaacggtacaataacacaaacggccggccgaagaacccatttgtaaccactggaagtgactgggtgcatgtggatgtagtcatcagcaaaaccgacacagtcatttatctaaatggagtaaaacaggcgcaggagacaagcacttatggagtgaaagaacttctgggaaacagcagcattcttcagattggtaaagcaaactggggcagcggcgagtactataagggctggattgataactttaaaatctacagcaaagccctcacagcggaagagataaaagagattccggatgacagctttgtaaatctgatgcttgaaaagaaggcagaggaagtcaaagacgttgtcatcagcgatgccaatacaatgcttcctgattatgacggaaccgtgacctgggaatctgcaatggaggaagtatcgattgctgaagacggactgtccgcaaaagtggttcagccggctgcgggagaagaacctctggaaggaaaacttactgccgttatctctatctgtggaaagcagatgagaaaggaagtaaatgtgacggtaaaaccagaagtgggcgaggaggatccttacgggtacatgatggttcactttattgaggacagcaacggatactgtgagaagatttaccttgacatatccagaggagataatccggagcagtgggatcccctcaacggcggtgagccgatactggcatccaacctgggaaccaccggtaccagagatccctatatcacttacaatccggagacagaaacttattatatcatagcaacggatcttcgtgtctttggcggcgacgatgcaggttggggtacatggtctaagagctacagcacaaagatgaatgtgtgggaatccaaggatctcatccactggagcgatgtacgtcagtttgacgtggcccgtgatatggatggaaacaaggtagcggagcttggtatgatgtgggcaccggaagctacctgggtaccggactactatggggaaggaaaaggcgcttttgtcgtatactggtcctctaaaacctatgcagaggatgatcccaaccatgatgcttccagtgttgagaacataatgtggggagcaaccacggatttcacacaggaaacctttgagtacggcggaaaattcctggatggaggcgccaaaggctggatcgataccaccattattcagaacgaaggcagaacctaccatataacaaagagcaatgaattacagattatcatggaatatacggatgacaaagagtggtggaaggaaggtacgcagtggaccagagtgcaggagagaatcggtcaaagccgttttggatcggtagaaggccctgcagtgtttaaagatcacagcaatgacaaccgctggtatctctttgtagatgatcttccctctcccggttatcagccgatgatatctacggacctgaaccagggatgggattatcttgacagtcctgattatttcctgacgccgaacacgaagcacggcggagtgatttcactgacgaaaaagcaatatgatgcagtcagaggggcagatgctgtatccccagtgacagaggaacttgacagtgtagaaatcagccagggaaaagcagcagaggagctggcagagctactgccgcagactgcacaggtgaacctggcatataatatgggcacctcagaacttccggtaatctgggatacttctgatgtgaatctagacgaggccggaacctataaggctgtgggtacggtacagtccatcagtgcgaacaaggggcagtgggttggaaaagacggatccactaagtatgacgcagaggataaacagctgtacagcagcagagcaataaaggtatctgcagaagtggtggtcaaggcagagacaccggatgtgacagtaaccaagattcaggtcaaagccccggataagactgaatatctcgtaggggaggagctgaacacagccggaatgaaagttactgctctgtacagtgacggaacaagtaaagatgtgaccaaagacagcaaacttgagggatttgattccaagacgccggggaccaagacggtgactgtatcctatgaagagaagacggctgacttccaggttactgtgaaagaaaagattcaggccggctgggtacaggaaggaagcaaatggaaatacagaaatccggacggaagtttcctggctgagacatggaagcagattgacggacagtggtattactttaatgaagacacgtatatggctaccggttggctgctggacggaaaaacctggtattatctgaaagcaagcggagcgatggccacgggctggctgctggatggcaatacctggtattacctgaatgcaaatggagcaatggtaaccggctggctgcagttagggggaacctggtattatctgaaagcaaacggaatgatggccacgggctggctgctggacggaaagacttggtattatctgaaagcaagcggagcaatggccacgggctggctgctggatggaaagacctggtattatctgaaggcaaacggagcaatggtaaccggctggctgcagttagggaagacctggtattatctgaaatccaatggagcaatggccacgggctggctgctggatggaaagacctggtattatctgaaggcaagcggagcgatggccacgggctggctgctggacggaaagacctggtattatctgaagtccaatggggcaatggccacgggttggataaaagtaggaagtaaatggtactatttgtacagcagcggtgcaatggcatccagtaagtggatagggaagtattatgtcaatgcttccggagcctggacaaagaccagataagaaaaattgaggaataagattattaccggcgtcattccaatggcagccggtaataattttatccgcccgtacttccttacggaaagtatgttataattgcagtaaaagcacagccaaacggaggacaaaaggtgcatttttttcgcagattaaatataaaaagccaaattgcagtactgattgccatcatcacagtctttatgctggtttcctttggaatcatagattttatgacaggaagggcagtaaagagaacaactctggaatcgaatgaaaagcttctgcagcaggtagaagggagagttgccgcttttacagatgatatggagaacatctcactttcccttttctacagccctaccattatcaattatatcggtctgtctcaggaggttgacagagtacttgcgtatgaggatgtatccgcggtgtgcagcaatgctatgtccctgaaaaaggggataaaaggggtaatgatatatgaccgcaagggagaattgtgtgccggcgtgggaactaaccgtacgatacctgccgggattgagagcgtttcccaggtagtctacaccggatgtctggggaaggacaaaaaatattatgcgattgtttaccctatctatgacttgaagagtacagagactaagaaaaggctgggaagcggagtgcttcttatggactgcggacagttgggggatatcctggagaattctctggtgacacagggttctgccatatctattctggataagaatgacaggtgcatggccttccggggggcaaagcatgatgagaagggactgcatgggggaaaagatgcagaatatgttacacggcgcacagagctttcaaaagcgggctggaccttggtcagcgatgtcccgggaactgagctgcaggctggcagacagaccatacggaaatactgtacagcggcctttgcggcaattgcagtaatcctggccttttttgtatttaccctatggacaggtatattaagacctgtaaaaaaggcaactgaattcgcgaagcgttatcccttgggagagaaagataaacgtttggagatggactataaaaatgaaatcggagatatggcaagaagtctgaaccagatgctggatgatattcagaggctgagcagcgatgtccaaagctctcagaagaagatgtatgaaatggtactggatcaaaaacagatggagatcatatcatacagaaaccaggtaaatccccattttctctacaatacttttgactgtatccgtgggatggcagcttattataatgtgccccagattgcagagataaccagtgcgctgtccaggttttaccggtatacggtgaaaggagacgattgtgtaactatcgcagatgaggtactgaacatccaggaatatgcgaagattattgaacaccggtttatgggcaggatatctgtgaatgtagatgcttcgaaagagattctttcctgtaccacaattaagctgctgcttcagcctctggtggaaaatgccgtttttcatgggttggaacagaaggtagaagggggccgggtggaggtgtttctgacaccccggggggccggaaagatacacataaaggtcagggacaatggtgtcggaattgaaaaagacaggttagaagagattctgcagcacctggagcaaagagaaaaaatatttccgggagaacctgattctgggtatgggattgggcttgctaatgtataccacagaattagattgttttacggtgaacatgcagagtttgacatcaccagcaagaaggacaaaggaaccacagtaactgtttgtattcccaattccgcggcaggaggcatagatgtatcaggtattattaattgatgatgaaccatgggcgctttatgggctgaaaacgctgattgattgggaggccctgggataccgcatagcaggagaggcagagaacggactgaaagcgatggaacttctgaataaaggaaacatagatgtggcaatatcagatatccgtatgcccgggatggacggcattcagctgatggagactattcaggaagaaaaacttcccgtggaagtgattctcgtgagcggctacagtgaatttgagtatgccagaaaagcggtccggtacggagcatttgattatctcttgaagcaggtgtcggcagaagagctgacagatgtgctgagaagactctcagatgcactgaaaggcagggaacagggcgctccggatccattgaaggaagaggcgcatttaagccatatgatgacagaggttatgagagatattgatgagggctttcccagggatatcctgctgaatgaattagcaaaaaaatatagtatcagttcagggcatttaagcaatttgataaaaaaggagacagggagtacctatacagagcacattaccagaagacgtatagaaaaggcaaaagagctgctgaaagatgattccctgagtattttagaggttgcagaacaggtagggtacggcgattatttttattttacaaagctctttaaaaggcagaccggactttcacccagcaaatacagaaaagaacagtagaaggaagatagcatgaaatggaatgtgaaaaaaacagggtacctgtttcttcttgtgctcacagcggcagtgaccgggtgcagccaggacagacagggggaaaacgatacactttcagaggtgcttccgcttacctggttttcggatgtgagcttttggcatccccctgaagattgggattgcagtgaggatactgtgcagggggtgcttacccaaaagacgggccttacctttgagatggaaataccgcccgaagatgcggagacgaagttaagctggatgcttgcaaatggggagctcccagatataatttctatcacagatgaaaaaatgatagataagctaactgcttcgggtgaggtatggaggatggatgaatttctcgaaacatatgacccggattctcatcttctgaaagactttcccggggatataaaagagggattgacggagagagacgggggctggtatgcgcttccgagccaccttagctcagaggacaacagggcgcggtatgcagaaatcagtactttttatcaggaactgcagaaataccatgagaataatgctgttatcataaacgaacagctcatggaagcctctggaataactctggaggaactaaagacagagaccgggtttgtgcaggcgctgcagaaggtgagatccatgggactgtcggtcaacggaaaaccggtgataccgcttctctatgacggcaatgcctaccaggaatcttccctgccatttctgcagatgaattttggcgcagtgcctgtaaatgacgagaggcactatcaggatatccttcgggatcccaattataaacatgccctgcattttatgaaccgtaccatcagggaaggctatgcagatatgaaacagctcaccatggataacagcgaaataaagaagcttttttccgaggaaagagtatttgcctttataggaaatattgccaatactggatatgacagttctctctgctggatatcaccgggggcaatttattccgatacaggtgcatcccctgtatatgggaaaaattttcgaaatctgggatggatccagactttcatatccaaagagaacccatatcccggggaaacagcaaaatttttaagttatgtaaccagtgaagaggggctgatgcttcttttttacgggattgagggaaaagattatacgctggatgccgctggaaaagctatccgtgcagaaaatggggagaagcgggaagagaccggactgaatatatactggccgtttgtgaatacagactggagctatacagtgatgccagagccagatccggataccagatcaggcaagtcccagattatgacaaaaaatgcgggaagtgcatatgttttggatgaaagaacagaaatgtatgacgcatccctagtaaacctttcggataaatatttggattttactgacggggaggaagagacgcgggaaaacctggaggcatataagaagaagctgactgctcaaattgttacagctccggatgaggaaagtgttgaagcactgtatagggagatgctggatacgatggatgggatgggtcttccggatatagaaaaaaagacagaccagaagatgcaggagtgctcacagagaatgcagagggatgcctgcaatggagaatgaggtggactgggaaataaaaaataagacaaaaatataaaaatagagccatatggacaggatatcagctgctttataatgataaagtggacagatatcctttttttgatggacaatggtacccccagtggtgccggatggagagaattcatgaaggtttttttagttgaagatgaatcaatgatgcgcagcggaattaaaaacaatatgccctgggaacgagaagggtttgagatagtaggggatgctgcaaacggaatgcaggcatatcccatgatacggcagaaacagccggatattttaatcactgatatttttatgccctgcatggatggcctgaaactgagcaggctggtaaaaactgagctgcctcatattaaaattctggcactcagcgaacgtaaagaatttcagcatattcagcgggccatttccatcggtattacggatttcctgccgaagcctgtagactccggggaattgatgaaggcagtgaaaaacgctgctgccgatttgataaaagaagaagcggcacgaaggaagctggaaagattccgggagaagacagaagaaaacaggaggcttcagaaatacaaacttcttctggccgtcctttcggggactatgccggaacaagagattctggggcagggaaaaagactgggcattgatttccagggaagcgaatttgcggtactcttgtttggtatgaggagtcacactaatatcccggcagatcaggaggctgataaatgcatcagagaatgcataaaagaactaaaacatacgattgccgttgatcggggccgggacggatgggtccttctgataaaaggagacaggctgggatcagtgaacgaccgtttaaatctgtgctgcacccgtctgacagaggctctccagccatacagagaggtaagcttctttggggggatcggaagaaccgtgtcctctctgtctcatattccttattcctgccgggacgcagaaaaggcgttttccgggagacatttccaggaccagaaccagttcgtttactgctgtaaggaggaaggcggtctgcagagaaaagagttttatgccagtcttcttatgcagtcaaaggaggcaagatgcagactggaccattttctgcgaaatggcctgtgcggagaggaggaagcctttgtgaactcatatctggatgcagtgggggaagggctgtataagttcagagtattgaggcagtatgttacgctggatgtgtatctcggcgtcataacctttctggacggcataggtgcagaggcctgcagcctttccgcagaggcttctgatatcaaccgtgcggctgagaacattcattcacgggacagtttgaaggcttatctgaggatgctgcttaaggaagcagttgaactccgggatgagcagtctggcgagaaatatggcttttctgtaaaaagaagtcttgcctacattgatacgttttacagcagaagtgatttatcactaaatacagtggcggctcatctgaagataagtccgggatatttcagttcactgtttcatcaaaagatgggaaagacctttgttgagtatcttaccggggtaaggatggagcacgcaaagaaacagctgtgcggtacagataagaagctttcccagattgggtatgaggcaggataccaggataatcattacttcagctatatttttaaaaagacgcaggggtgcactccctctgaatatcgtaagagaaacagaaaacaaaggtaaagcagcataatgtttgtacctgttttatttgctataagcagtgatcatcctgtataatgaaatattatacgcggttgcacagcgaagcgcagagaaaggcaggcaccagttatgctgcagtacattgatcggatagaaaataaagggatcctggggattatgagaagatcctgcaattatgtggatcccaggcttatgaaccatggttacaggacttcatatttggtgtcaaagatattgaaaaagacaggaaaatacagcgcagttcagatgagggatatttgtatcctggccatgctgcacgatataggtgcttataaaaccgaagagattagcagaatgctggagtttgagacggagaatgtatgggagcattccaactatgggtatctgtttattaagtatttttctccccttgccagactggccccggttgtgctgcttcatcacacttcctggaagcagctaaaggagatggggaatgtaagcgaagagataaagacacttgcccagattcttaatatcgcggacagaacagatgtgtacatggaggaagagggacaccgctgggaggatttcacagtactgctgagacaggagagcggcaataaatttgccccctggctggtggaacttgtgacggaggcagggacggaaggcttgttagaaaagagagccctggaagacgagaaatttaagaacttgctgggcagccttccttttacaaaagaagaagtgaaaaactatctcaggatggtgatctgtaccatagatttccgcagcagacatacggtaacgcacactatgacgaccaccagtatcagctatgagctggctcttcgaatggggatgagtgagagggagatcaccagtattgtgcggggcgcccttctccacgatctggggaaaatcggaatacctgtagagatactggagtatccgggaaggttaagccctcaggccatgcatattatgcggacccatgtaaatattacggaagagattcttgggacagatgtggatgagaccacaaagaggattgccctcaggcatcatgaaaaactggatggttccggatatccgggaaaacttaccggcagggatctgacaaagggagagagaattgtggctgttgcagatattgtcagcgccctcacagggaccagaagttataaggatgcatatcccaaagagaaggtagtcagcattatagaggggatgcgaagggagaataccattgacgcagaatgcgtcagctgtatggtggcggattacgaagggattatggaacatactctgcagcggtgtcagcctattttggatgcctactataatattaaaagagaatatctggagaatgataagataataaaaaatttatagagatgaaaaaggtaccctgaaggaaatgttatctgcggtgacattcccttcagggtatcttttgctgttaccggtatattataaccgcagtctttccatgcatttcttcacttcatacgttactttttccaaatcaatggtcataaattcccctttataatacaatatatccccccgaaccatagtcatggccacatgatttccgtgggcggcataaacaagattagacacaggtgaagtaaggggtgagaggccgggatgacttagatccagggcgatgatatcggcatcccgccccggggcaagtatgccggattctccctcccgtccctgtgacaggagtcctccctgaaccgccatggagagcacttggccggcgtccgcaaattccggatccttatggattcccttctggagcagagcagtaaatttcatagtttcaaacatatcgccggaattgttagaacaaaccccgtctgttcccagagcaacaggaatcctccgtttaataaaaggtttcaggttggcaaacccacagccgcattttaaattgctgcagggatcgtgaacaataacggccctggaggaactgagaatctcaagctcctcctctgaaacatagataccgtgagcagcaaccactcttgaacgaaacacccccgccctttgaagggcggtaatgggagaacaaccgtaactttggatacaattttgcacttcttcactggtttcgcagatatgggtatgtatccctatatgttccctgacagccagatccccgataaactcccagagggccggggtggtctgaaatacactttgtatactggtatcgcaccggatacgccccctgtcccagccgttataagtatgaatcaggtcaatggatcgcctgacagagggaacaagagccggatcctggtctgcagagcaggtaatactttcgcagatattagcctttatcccgctgtccacagcagagcggagaatggtgtgggaggaccggtacatatcgctgacagaggttgtcccgtaggccagcatctctgcaattcccagaagagagccatagtaatagtcgtcatccgtgagggcttcctctgcaggccagatatgtgacagccactgatccagaggacagtcgtcagaaaatccccgaagcaaagccataggcgtatgggtatgggcatttacaagtccgggacagaggagaaggtttcttccgtcgattttcttgtgccgggcagggagctgctggggaggttcctgtccaatatgggagatacgcccgtcttcggttaccaggcaggcgttataccgtacaggggcagtgtcatccagggttaggattgtggtgttagtaaatacataattttctttcataggttcctccgattggatgttaacgtaacaaaaatgaaaaactcaattatgtttctaatgtatacctcacggccggaagttgtcaattgtgaaaaatgtcaataaatgtgtgcgtagatcattagaaagtaacaaaaatgtaaacacaagaaaagaaatagcgaaaaacaattgacaagtttagtaaaaagatgtatgtttgttacgtaaacaagatacgtaaaatttacgaaacagaaaaagtaacaaaagaaaaatataaggataagaaggaggaaatgaaatgaagaaaacgaaaaaggctctcgccatgctcatggccgctgctatggcagcaacagtgttcactgggtgcggaaaggaagaagagcaaaaaggctcacaggaatctgcctcgtccaaagaagagggggattcttcggggaaaaaggaattgtccatgtggttctggggcgcatctgattatcagagggaagccatggacaagtatctcattcaggcgtttaatgaatcccaggatgagtatgagctgaccgtagagtaccgggcatctgtggacaatgatattgcagttgctctgtcaggaggggaggggccggatattgtatatggttcagggccggcctttgtagcaggatatgcggcggaaggcctgtttttgaatctggacaagtattcagaacagtatggctggaaggatcgtgtgctggatccctgttatgagatctgtacgattgacggaagtctttacagtataccgggcgcgcttacctccaccggggtattctataacaagaaggttctcgaagataacggctgggaagtgccgacaacttatgaacagctggtagacattatggaacaggcaaaggagaaggggctttatgcaggtcttaccggagccaaggactggcggtataccaatgagatgtatgtggggatgatgctgacccatgtggcaggtcctgaagttatgtataaggttcttaccggtgagcagaagtggaattcccctgaggttgctgaagccatgaatgtgttggtggactggtataagaatggttaccttgccggggaggattactggaattttgactttaatgaggctgctatgatgctggccaatgagcagtctcctttcttctacggcgctcttaatgtatttcagtttataaaaaacatagctaccgaggaacagtgcgataacattggattcttcccattgcccaattatgacggcagtacggatcacagagcatccctgggttccatctgctctttctctattaattcccagtgcaaaaacccggatggggcggctatggttctggattatatgcttacctctgatttttcagcgggaatgtcctcccagtggcccggatattggggaatgcctctgaaggatcttacgcagattgatttggaacagtatcagggaatttacaaagaatatatgagaacctgtacggatattgtgaaatctctggatgagggtgattttgcctatggcgcggctacctgtttcccggcgtccacttatgaggcctgcattgatattgatacggtatggtttggagaggctacggtggaggaatacctggataatatggataaggcctttgcagaggatgtagagaagaaatctgtagccaccattcctaaacctgcattttaatttacttagcataactgcggaggggcagagacctgccctcccagtgagacggagaagcttatgaagaaaaaagattcaaaatatattctttttatgatgcccgctatccttatcagcgccagcgttgtggttttaccgggaataaataccatatattcctcttttacagactggaatggatttgcagccaaaaagaattttatcggactggcaaactatatcagcctgttccaggacaaatatttctggatcgccctgaaaaataacctgatctggatggctctgtttttaaccgtgccggtggtgataggaatgggagttgcccttcttcttttaaatagaaaaaaggggcggaatatgctgcagatggttatgctgattccatatgttctggcgcctgtggtgactgctatgatttggaaaaatattatatacagtcctacctctggcctcctgcagtttatcaatcagatggacctgggatttgtgctgaaaacgcctctgaccagcaagaactttggacttattgctgtggcagccgtagatatctggcacttctggagttatctgatgattatctatctggcatctctgcggcaggtttctgaggatcaggtagaagcggctaaattggacggagccaatgcctttcagaggtttcggtatgtatattatcctaatatcaggcctacggtacggctgatgcagattatgattgtgatcttctccttcctggcttttgattatgttcagctgatgacccagggagggccggcccattatacggaagtgctgagtactcttgcctattccgcggcctttagtgagcggaagataggcatggcttcttccatttccattgtcatgagcttcttcggcctgattgcttccgtgatatatatgaagttaagcagaggggaggaaagggattagttatgaagagaaaaaaatgtacggcaatttttcagtggatcatcattgccctattgatatttattgttctgtttccactgtacctggtagtgattaatgcatttaagcctcatgctgatattgtcactaatcccattagttttccaaagtcagcttttctggacaacttttccaaggcctggaggactgctaatttttcaagggggttttttaacagtatccgtctggtggtcacaaccgccctgattgtactggcagcctctgcctttgcaggatatgccctgggtacaaaaaggtttacagggaaaggtctcttgctttcatactttcttctggctatgaccataccggtgcagttatttctgttccccctctatggtgtatttgcaaaattggatctgatcggaaatatctatgcggtttcctttgtgattgccgccatcaatatgcctctggcagtaatgcttatgcgtaccttcttcgtgggggtgcctatgcagctggaagagtcggccatgctggatggggccaatacccggcagattctgtttcagattatttttccctgtgtcaagccaggattcattaccgtagcggtgattgtcatattaaatgcatggaatgaatatctgatttcttctacattcctgcagggggaaaggaactttacagcaacactgggatacctgtccctgaacggaggatctgttacctttgaccaggggatgaagatggcaggttccctgattattgtaataccaatccttatcttctttctgtctctgcagaagtatgtggtggatggactcaccgcgggatcggtaaaagaataggaaaaggaggagaaagaaacgaatggtacgagaagaatacgataatcctatggctcaaaatgtgcgggatgtcccaggtctctgcatcagccagtgcatattattagagaaggcttcacgtcttacactatctgcccgggagatctgggacctgagcagaatcattgttacaggctgcggagactcttatgctgccggcctggccatgaagccggcgatagaggagctgaccggattgcctgtggaagtgatacccgcagtggatctggcccggtataccccctcggaactgctgacaagacaaaaaggaacccctctggtgctggctgtgagcaattccggaagggttgcacggctgggggaggccatagagagagccggaaattacggatgtctgactgttgccgttaccggcagtaaggaatccagactggcccgtgtatccaaaaaggcagtggagttatctattccggagtttgtatccggaaacggggtgagaagttatttggtatctatgcttgccctgctgattatagcaatccgcataggggaggtaaaaggcaggtataccatggatgactcccagagcataagagatgaaatctgtttctatgcggaggaatttcagaaaatgctgcctgatctggatgagcagatgttcaggactgcagagaaatatgcgtccaaggagctgtttgactttattggctccgggggaaacacaggcactgcctggttttcccaggctaaaatcattgaggccactggggagtgggcggcatacagtgacacagaagggtggatgcatctgaactgctttttcaaacatctctccagaaaacttaccgttcagtacgcctcggcaaaaggaccggaacttagccggtcaatggaacttatgtgggcgatcacagaaatgaaaatggatttttgtgtgataacagacagcagtgacctggtgctgccagaaggcgcagagcggatatggatacccggctgccggaaagattggatgtggcctctgctgaattaccttccggtatcgcttttggcgggttacctctgtgaactgaagggggaggcctatggaagaggatgccgggacagctggaaggtgtgcggaacaacaaagcttctcacggaaagcagaatagagattctataggagaaaagttatgattaaggagtttagattttctacaaagaaggacgacgtattctgcctcaccggatatgtggaggaggcaatagaggagagtcagattcaggaggggatgtgcatggtgcatattcctcatacaaccgcaggactctgtcttacctcaaaatgggatgagacagattttgcggatatcaaaggagagctgcggcggattgtgcccaccagagtggacttctgccatcagtttgatactcccgaagacgcggcaggacatatcaaatcggttcttaccggctgtacactgccgattctgatcaaagacggaaaagcccttctgggaagctcccaggggatttattttctggaatttgacggacccagaaaccgcatgtgctatgtaaaggcatttgtctgttagaggaaatattcaaaaagtaaagaaatgaggttatagtagtctatggaaagaaaaaagttaatactgaactgtgatccggggacggatgattcggtatgcattattatgggacttactcatccgggaattgatctgctggggattacggcagaaagcgggaatctgcctgcaagtaaaagctgtgccaatgcccttaggattctggaacttatggaacgcccggatatccctgtagccaaaggaatggagcaccctctggtaagagagtatccaaaagatccctattcccacggaaaagacgggctgggaaatcatttttttccggaacctgagttaaagccggattccagatatgcggcacagatgatcatagacctggtagagcagtttcccggggaggtgactatcctgtccactgctccattgacaaatattgcactggcatttatgctaaaaccagacattattcctatggtaaaagaggtatatcacctgggcggtgcatatggggtcacggattatgcatttctcaacgcaacaggggacaatcctatgagcgaatggaacgtttatgtggatcctgaggctgcaaaggcagtatatgagtctggggtaaagctgacaaccataggcttggatgtagcgttcaatccggaatgggtaaacatccgggaagaggcgcttaaaaagctggaaaaattgaataccaaagcgtccagatatgtgcttgagattattgattatgtggataagaacaattcactgccggacctgtttaataatggtcctattgacacggtagctatgtgtgcggtgattcagcctgacatcatagaaaccagggagatccatgtggaggtggataccagtgacaatcagcttaccagaggaatgaccctgtgggacagaagaaaccatttcaaatggacacatattcccagaatatggacagcctgtgccattgacagtgagcgctatcagagaacctttgtggaagctgtaggggggaaaccctatgacgaaatctgacagcgcaaagagggagacaccaaccctgcataatcaggcagagaaggggcagattgcggactgcgtactgatgcccggggatccgctgcgggcacgttttatcgcagagaactatcttgcgggtgccagactggtcagtgaggtcagaggcatttatgcctacacaggcagctgccggggcaggaaagtgtccgtcatggccagcggtatgggggcaggatctatgggaatatactcttatgagctctttcagttttacggtgtggaaaagattataagagtgggatccgcagggggactatcgccttatctggctctcagagatattgtaataggcactgcatccagcacggatacaggatatgccctccagtatggtctgccgggaaccctggctccatgcggggacttcgggctggcaagaaaagcttttgactatgccgaaaaacaggggcttggatgccgggcgggtatgctcttttccggagaggccttctactatgaggaggaaactcttagaaaatgggcacagatgggggcactggcagtggagatggagtcggctgcgctgtacatgaatgcggcaaagactcataaaaaagcattggcaatttgcacgatttctgatttggtattctctggcgaaaaatgcagcgtggaagaaaggcaaaacagctttgatgacatgataaagatggccttatctataattacataatcgggggaaaggaaataagaaaatggcaagttcaaagtataccgtacgggatctggcgagagatgcaggtgtgtcaatcgccaccgtatcccgttatattaatcaggattacgcttctatgagtgagagtacccgcaaaaagctggatgagttagcggaaaagaatggatatgtgaatgcaaagatgaaaagcccggccaatatcgctgtggtgattcctgatattacagatcccttttttgcacaaatcgtggaagctgtggagaagtgttccgaaacttataattataatgtgcagctttgcctgagccaggaatcctttgagagagaaaagcagtacatcaaaaaactgattcagcagaatgtgcagggaatcgtctacatgagcactgtaaatgaggaaaaaaactgttatgatatgctcaaagatgcagggaagcctttcgtggtgcttgacagctacctgtcagagtataacgtgcccgctctggtattctccaacggcgtatggggcatgtatgaagcaacaaaacatcttatagaaaacggccacacacagatcgcgtatatctcaggcctgcgttttcacatgtttgagcattaccggtaccagggatatgtgaatgccctgttggattccggtcttgcagtgaatcccaatctggtgaaatttgtgggattcggtatgctggacggagtaaaatgctttcgggagcttatggagagtaaaaataagtttactgcggttatctgtgaaaatgatgtgctggcaatgggggtctataaggtgtgcgcacagatggggcttggaatcccggaggacttatcaattataggttacaacaatacgatcctgtcggagtgtgcccagccggccatgacgtcggtggaccagcacgtggatgacatgattcagacagccgtggatcttttgatgaagcagatccataatgaacctataacagataagattatccggattgctccgtctcttgtaaagagagattctgtaaaaaaaatcaactgaatatagaataggagaaagagatatggcagattacgtgattgccggcaatgctgctgtagacaagataacgtttgccgatggaacaagcaccggtttcatgccgggaggagctactttatttgccctcacagggatccagctgtggacagacagcgtgctgatgtgcgggggattcggtgcggattatatggagcatatgggagactggatggagcgcaaccatattgaccggagaggatttcatgtaagagatcccaaaaatcctttaaattatctggtgtacagggacagcggagactggtattcctatacagaatatggaaatgctcattatgaaagcctggattgtgatccccaaaaggaccatctgcgggaatttttgaaagggacaaagggggtctattgcttccgggcggatgatttggactttttcggacagatggcacagctgagaaaggaattcggctttcggtttatgtgggaaatcaaggctaccattaccgttccggaaaagcttccggtgatccgaaggatactgaagaatacagacgcattttctattaaccgcagagaggcgtatcggttattcgaagtggaggaagacagcgaagccatacgggcgctgcagggacttgatgtgcctatggtggtataccggattggctcaaagggactttacattatcaagggggaagaggtattttttgcccccagctttcagaaatattccgtggtggatgtgaccggatgcggaaacagctctactgctgccgccttttacgcctggtgcgagaatatggatgtctgcggtattgctgccgcggctaatattaccgcaggaatgaacctgagataccagggggctatggaactgactccggagaataagagaatcgcccggaaggaaaagaaagagctggaaaaccgatacagaaaaggcagtatggaggcaggaattgtatgaaagaatccgtaaaacggttacttgatagttatgtgtacaaagaccgtatggagccgggaggaatcatggccccgggaggtctggcaattgaaggaaaacctgctatgacagggattgatcctgacaaggtgggaagatatgtagttatgctggtacgggatcctctgcttgtgtatggcggggatcccgctgagattcttgcaaaaagactggaaaatccggtattggcgggtaagacaggtctttttaccacctggagcggttggtataagggagcccatataaccttcgtcagcggaggcagcggtgcgccggaggcggagctgccccttgtggagctgatgcattacacaaaagcagatacctttataaggctcgcaggctctgcggccatcagcgaagaggtgcatagcggggatgtggtaataagcagcggaatcgtaagaggggacggagtctccaaagtttatatagagcctgaatttcctgccctgtgcagccacgaagtggtactggctatgagcaaaagcgcttctgatctgggctgcagatggcatgtgggggttaccagatgctctgactgtgagcacgtgggcggcggacgtccggctgtggatgggtatatacagccctggcacacggagattatagagtattataacagggcaaatgttctaaacctggatcgggagtccagtgttattgccacactatgtacactgttccaaaagcgcgggggtgcggtattctccatagacaataatattgtaacccgagaacggtttataccgggacagggacatgatgattccatccaggtagtccttgaggggcttgccaatttacataacatggatgtacagaaggagaaaaaaaatcttccctgctgggtgccggaggaaatagaataaagctatggatgagagccaatacagaaaaaatctgaaggtacctctgcatcgggtggacgtggttttagatacggacgctttcaatgagattgacgaccagtttgccattgcctatctgatgaattccggggaaaagctgaatcccgctgcaatttatgcggcacccttccataatcataaatcctcttccccccgggatgggatgaataagagctatgaggagatcaaaagaattctggatctggggggacacggtgagaaaaaggaacaggtattttacggggccgacagattccttaaaaatgagaccgaacctgtggattcccctgcagtgcgggatctggtgcgcagggcaagggcgtatacccctgaaaatcccctatatgtagtggggatagcagcgctcaccaatattgcctctgctcttttgacagagcctgcgctgaaggaacgtatcgcagtggtgtggctgggaggaaatgcacgccattatgcccataaccgggaatttaatatgatgcaggatttggcggctgcaagggtggtatttaacagcaaagtgccgctgattcaggtgccgtgtatggatgtggcagagcattttaccataacccgacctgaactggagtactggctgcaggggaagaatcccctgtgtgattatctcacggggattgccataggagagatggagacatgggcagagggaatgccctggtctaagaccatatgggatgtgacggcagtggcctggcttctaaacgaccgggggaagtttatggaagagaggctggtatccagcccgattcctgaatacaatgatacctatacctgccgcggggacaggcacctgataaactatatataccgcatccatcgggatgcgctgatgaaagatttaatagaaaagctgataaaataaaatgtatggatacaagggggcaaaacaatgatcagtacttacagagagaagatatatgcaggcgttcttggaaaatgtctgggagtctatatggggcgcccggtagaggggtggttttatgataggatcaatcaggcattcggggaggtctataactttaagcataaggctgcaggggcgcctttgattgtgcctgacgatgatatctcaggaacctttgcttttttccgggcgctggaggataacggctatccgaaagatcttacggctaaacagatcggggatacctggctgaactatctggtggagaataaaacaattctctggtggggcggtctgtcccgttccacggagcactctgcatatataagacttaaggaaggaattccggcgccccagagcggaagcatcgcccagaatggacagagcatggcggaggctatcggcgccgaaatctttatcgatacctgggcactggtaaatcctaatcaaccggaacttgcagtccgtatggcgaaagaagcagcaagtgtgagtcatgacgggattgcggtgtcggccgcgtgtttcctggcggctatggaatccatggcctttgaggagaccaatatagatactctcatagatcgggggttatcctatgtggatgacgatcttctgcatcgtctggttgcggatgtcagagcacagtgcagaaagtcatcggactggcacgaggtaagggagtggatagcggctaaccacggatatgaaaaatatccaggcaactgccctatgataaccaatcatctggtagttttgtcagctcttctaatgggcggggatgactttaataaatcgattatgatagcagcctcggcaggatgggatacggactgcaatgccggcaatgtgggatgcctgaacgggatccgtctgggcctggagggaatcaacgggggagcagatcttaggggccctgttgcagatcggctatatgtagttactgcagacgggggagactgtgtatctgatgccgtgctggagaccagaaaaattctgagagcagccgcggaactgtatcaggaaaacatagagctcccggataaaagatacgcctttgaatatcccggcagtgtgcagggatttatgattcatccggattacgcagaggaacaggccctgtgcgggatatccaatcctctggggcagggactggaactggagtatcggcatctggcacctggaagcagcgcagctgcctgcgtggagacttatgtggacaagagccctaagggagtgggaggaaccagctattttgaagtatatgcatcccctaatttgtatcctacccagaccgtaaatgctttgttcttctgcccggatgaggagacgccgtccctccgctttttcgttgattattatgacggccaggatcagcttcagaagttaacaggggaggaattccagctgaaaccgggagagaatctgatttcctgggaagtgccggaacactgcggacaggctatttacaggctgggaatacagcttgccagcaaaaagaggctggacggaaaggtgattctgaaatggatggactgggccggggctcccagaaggtatgagatgggcaagtcttacgagatgaccccttctctggttacctggaccaacgaaaccatctggctgaagacttttgtcagctcggcggataatttttatccggactacctcagaaccttctccgtatctcaccccggaaagaatggaattgtaactaccggaggtccggactggaaggattatacggttacctctgctattacattttcccagcaggaatgtgccggccttgcggccagggcgaaggggcaccgaaggtattatgctgccgtgttccaggacgggaaggcaaagattatccggaggaaggactgggagattacggaactggctgcagtgccctatgagtataaaattgatggagaatatcaggtttcatttaccgtaaagggggaacatttgtctatggcggttaacggagagactgtggcagaggcggaggattccagctatgtccggggcggagccgggtatgtcgtagaccggggggccatcctgggagatggtttcacagtacaaagagtctgattgaaaagtaagcagcgcctgcatccgcagaacacggaggcaggcgctgctttttgtgagtgatttttataagaaatcacagcaagagcagttcgatgacaaacacacagagacaggcaatcagtgatacctgaatcaggcttcgtccccggtaagccaggagtatggcagcggcaaacgcagccagagcggaccaaacatttgccgtagcagttaatatggccggaaaggtcatcacagagagcgtcacaaagggtacatagtgcagaaaggattttatgtatacatttgtaatttctttccggatcagggtgagggggagcacgcggatcaggtaggtgaccaccgccattacaaggatatatatgtagatattacttttcatgggattcctcctttactggaaacagaaaagcggcccctcccgcaatgagcaccgtcagaaggataatacggaagccagaggagatggagctgaccacgggcagcttggtgaacaggaagcttagccccatggaagccaggatgactcctgttaaaacccggttgccttttgcaggagggataataacagccaggaacatgccgtaaagagccacgctcagcgcactgatcactctgcccggcagaatatctccgcagacagctccgaacagtgttcctccggcccatccgggcacggctgctgtgatcagcccataattataaaaggggcttaagcgtccaggcttgcacacggagactccgaagatttcgtctgttaccccataagccacaggaaaccggtggagaaagctgtgccggctgtccagcttctgggagagggaacaggacataagacagtagcggagattgataataagctgagtgacggccatctctgtataggaagcagaggcactgataattcccagtgcggcaaactgacctgcagaagtcagattagcggcagacataacaactgcctggagcggagtaagtccggatccgctggccatgatgccgaaggtaaaagatacggcaaaataccccaggcagatggggattccatccttgacgccgtatttccactgcaaatagttactgttcatagttggtactccttggctttttgcacaaattatagcatttatctttacatcagtaaaacaaatgtttattatgaatacataagatatacttatataaaaataaaagaagggatacatatgaaccgatatcaggctgtggtcaaaatcgtagatacaggaggctttaccaaggcggcggaggcactgggctacacgcagtcggcggtaagccagatggtacagtccctggaaaatgagctgggaaccatcttatttaccagatctaaaaaaggagcggagcttaccccggatggggaggaactgcttccctacattaaaaatatatatcacgcgtaccgggagcttaaggaaaagcagagagaaatggaagggctggaaagcggtattatccgcatcggcacttttgccagcgtatcctgtcactggcttcccgggctgatgaaggagttccgggagagttatccaggggtacattttgagctgtaccagggggactacaacacggtggaagaactgatccgcgaaggcagtgtggattttggattcatcaacccagaggcagtaccagatatgaaaaccatacctctcagggaagaccccatgctggcagttctgtctccttcccatccccttgcagccagagataaggtttccctgaaggccctggccagagaaccctttattcttctggaggaggggcgggtcagcgagcctctggacttttttcagaagcatgggattattcctaatatacagtacagggtgcacgacgactataccattatgtcaatggtggaaaaggaactgggggttgccattctgccggaactgatactgaacagactgaattataatattgcagtaaaggagatagagccgtgcctgtccagaaccattgccctggcttttaaggaaaagaagactctgcctatagccagccggcatttcttggagtttatatccggtaagctaaaagctgccggacctgcatagaacagggcaagattactcatttgatcggaaaggaaagcatatgtggaagattactatcgttgaggatgatgaagggatccgccgggaactgaaagaacattttgccggtcagggatttgccgttacagcctgtgaagcatgggaagacaatgaagcaaagctcaaagaagcggatcttatactgctggatattcagctgggagccctgaatggtgtatccctctgccggaaaatccgggaggaatcggcagtacccattctatttgtaacctgccgggattcagaacaggacgagttgactgccatccgtgccgggggagatgactttatccggaagccctacagtctgtctgttttgaccgcacgggtgcggaggcttcttcagcggaacagccaggcaaaggaaagcattactgtgggcggggcggccctgaatctggtattcggacggattgagttccaggggaaatctctggaattatccaaaaaggaactgcagattatctattatctgtttctcaaccgggggagaactgtgctaaaagatgaactggtggaatatctctgggagaataaatggtacgtggatgagaacattctgaatgtaaatctatccagactgcgcaagcgtctgggtgagattggactgggggatctgattcatacggtaccgaaacaagggtaccgggcaggaggggagcaggaatgaatttttggtgctatctggaagaaaagctctttgtgatgatgggaaacctgtttctcatggttcttgccggggtttacctgagagcctgcggcaatccgggggctgccatattttactttatcggtatttggcttttaattctcgcaggaaacctggtgtgggggtatgagaggcagagaagaaaatacagggaaatgtgcagtctttttgccgggctagaggaaaagtatctgatctgtgaactgatggggaaacccaaggatcagacggaaaagatgtattatgaaatgctccggggagccaacaaggccatggcagagaaaattgaagaggtgcagaagataagccgggagtataaggagtatgttgaagagtggattcatgaagtaaagactccgattgccgccggaacccttatctgcagcaatcacccttccccccagaacggcaggataaaaaaggaattcgcacggatcggagaattggtggaacaggtgctgtactttgccagaagtgaacaggtggagaaagattactttatctccgaatgtattctttcagacgtggtgaatccggcgcttttggcctatcgtccctacattctggagcggggaattgggctgcaggtagaggagctctctgaaactgtatatacagatggaaaatggatgcgctatattctgggccagattctgtctaacgcagtaaagtatcaggacaaggaagagcccgggattcatatctactccggcacagaacaggggaagatccggctgtgtgtggaagacaacgggagggggattcccccggaggatctgccccggatctttgacaaaggatttacaggaggagacaggcagaagaacggggccacaggcatcgggctatacctctgtaaaaagctgtgcgagaggctgggaattgccctgtctgtcgcctccaaagagggggaggggactacagttactcttgagtttcctgtgggaaatctgcacagaatgtaagggagtgaagcgttattacaactttgtaagtaaacaaaggaaaagaagggaggtatactgaagaaaacgtatacgaggagtgattacatgaaaacattactgagaattgaggaaatccaaaaatattacggatcccgttcctttgtcacaaaggccctgcacaaggtctccttttctgtggaggaaggagagtttctggggattatgggggcgtccggttccggaaaaacaaccttgctgaactgtattgcaaccattgatgcggtgaccgccgggcatatttatctggaagaggaagatattacagcactgagagaagaagagctggcaaagttcagacagaagaacctggggtttgtgtttcaggagtttaatcttctggatacccttaccattgaagaaaatataggacttgcacctgtgatctgcaaagaagatccgaaaaagatcagtatacgggtgaaggagatcgcaaagaggcttggcataggggacattcttaccaaatttccctatgaggtgtcaggaggccagaggcagcgttgtgcatgtgccagggctatgatcaaccatcccaagctcattctggcagatgagccaacgggagctttggattcccagtccgcaagaatgctgctggaaagcttcggggctctgaaccgggaactgaaggctacgattttaatggttacccatgacgttttctccgccagctactgttcccggatcctgtttctcagagacggaaagattttcaatgagatccgccgcggaaccagggagagaaaagaatttttccaggagatcctggatgtggtaaccctgctgggaggtgatgtttccaatgctcagtaaactggcagtaaggaatgcaaagcgatcggcaagagattatctgatttacctggtaaccgtaaccttttctttgtctatggtgtatgcctttaacctgattgtgttctccagcgagatacggaacctgagctacggcatgagtgctatgaccggaaccattatctttatctctctgattattgtatttgtcatcggctggcttatctgttatatgaccagatttatcctggagaagagaagccgggaattcggcacctatcttcttctggggattcccaaccgggatgtggccagcctttttgtcagggaaaatcttctgatgggcgctggggcttttattataagtctcctggtggggagctttctgtatcagatcctggatatggtaattatgagaatctttcaggcacagtatcagatacagtttcagttttctgccaaagcactggctctgaccgcaggatacggggcagccatctatctgtttgccatggtgagagtgagacggcagctcagaaagattaagatctgtgatctcctgtatatggagaagaaaaatgaggcctcggctctgaagaccggaaagggccactggacccttttcctggccgcagcggctgcctgcgctgcgggggtaggtaccttatggtatctctgccaccacagtgaggaggtacacaatgggggtgcactgctgcttctctccgtggttttgctgatcgggagcatctatgggatctatatgacagtgaccttttttctcggtagaacagtgctggcacgggatagctttaaatataagaagcaccgcctgtttctcctgagaaatatgaccgccagaatgagaactatgggagtaaccataggtactttggctctgcttttaactctgacccttacagcgacctctatggggctgttgtttgagcggtttttttctgagaaaagagagagcaccatgtcttttgacatcacggtatctaccacccagccttctgaggatttgagcccggtatctgcttatgctgaagaaaggcttggaattcgaagccagcttgcctacccattgtatgacggagaaagtaaaatactgacagactggttccgcaaacaggacagcccggtgggatggatggaatttgcgccggttctggcttattcggattataaagagcttagaagaatgctgggctacggagagacagaactaaaagaggggaggtatctcatacagtgcacacccagaatcagggagatagcagagcaggagaaaatccctgacatacgcctcggaggggagacacttaaatatcaggaaagccggtcggaatcatttggagtaggggatggatttaacgggacagggtatgtggtgattgtaccggacaatattgcgggaaaacttcccgtgtatcatatgtctctggctgtccagacagaaaaagaaaccaccccgcaggatgcggaaaatctggtaaatctcctgtatgaaacatacagctatgaggggattgacacctgcaataccaaagggagcatacgggattcgtatctgtctgtatttaccattctggcattttctctgtattatgtgggtcttatctttgtctgtgcagctgctgcagtgctggcagttcatcagttaagtgaggcggtgaagtatcagtttcgctatgagcttctctctaagctgggggtgggaaaccgggaggggaaaaaactggtgtttcagcagcagctgttatttttcggggtgcccctgatgattccggtgcccttaagcatctttttgtccagacagctttcttactggatgatgatgaatgagatttccaacaaaacgtttctgcattcccagggaatcagtctgggattgttcggattagtttacctcatctactttgccgcatcctggagagcctgctcccgtctggctttttcctgacaaataagcagaggccaggacaacagctgtgccggccagctgaacgggggagacgggctcccccaggaaagcggcggcaaagaagatagcagatacaggatccatatagctgagtacagccgtgagatgtgtaggtgtctccttcagaccagagaaatagagataacaggcaataccagtatgcacaattcccaagatcaaaagcaggggaaggttagccttcactacagtaaaattgtgatgctttaagagaaccggggagagcacaagggcggcagccagcagctgtatcagcgtccggtccatattatcaatgttgtccagctttttattgcagagaatcagcatggcataaaacagcgcagaaccggcaccgcataaaagccccagcccgtggtggtatacggtcaggggggcttccccggaactgaatacaataagagccagtccggccggagccagaagagcagtgacaacctgttttttggacagatgttctcccagtacaaagggagccgcgaataaaaccagcacaggtgccagataataggtcatagtgccgatggctacagtggtacagcgcagtgcctggaaaaacagaagccagttaatccccataataactcctgacacggcggccagacagagggcccttttcccgcagcggaaggggttctttttttttcagcagcattaggagggagaaaaaaatactggcaataaaaacgcggtagaagacaagttccacagtagacaacgaaattccccggacaaatatgccgatacttccaaagatcagcatggggataataagcttcagacaggatttccacatatgtttctctcactttcatcagattctccgcagggagataagttatcttttattctaagtgacgggagaaagcaagtcaaccggatttgagtctggaccttcgtctgaaatagaaaaaactgatgagaaaaaaggataactgtgatacactgttaggagacagaaataagggataagacaggagttaaaggagcaagtatgagggaacagctaactaagagtgacgtaaaaaagattcaggaagagatagaatacagaaagcttgttgtgcggaaagaggcaatagaagcagtgaaggaagccagagcccagggagatctcagtgaaaattttgaatattatgcggcgaagaaggataagaataaaaatgagagccggatccgctatctggagagaatgctgaaaacagctgtcatcgtatcggacgaatccagggaggacgaggtagggattaataatacggtaaaaatatatttcgaggatgaggatgagacagaagaattcaaactggtaacctctatccggggaaattccctgaagggtatgatcagcacagagtctcccatcggtaaggccattctggggcatgaaacgggggagcgggtactggttaaaataaatgaagaaaccggatactacgtagttatcagggaaatccagaacacccgggatgacagcgcagataaaatcagaggattctgaccgctggtctgccttgcatggaaggggaaactatgagaaatcagattatccatctaaaaacaatagaacggaatactaccctgtatcattacacacagattgcgggggtccaggggattttggatgaaaaaagcttttgggctacaaaaagtgactttctcaatgacccgagagaattttcttacatcatagaagtgatccagcagatgagcggatctgtctttaagaacaagggatggaaggatctatttcttaagaatattttcaaggagggggaccattttgtctatgagaaaaataaggaatttttcgtactggcattttccacctgctccgacagcataactctttgggcggagttcggcaatgagaccggatacaatatggcctttgacagtgaaaaaatcatcaaaaagatagcgaaaagcaatgccatcgcctatcacgggtatgtggtatatgctctggaagaacaaagagactatattctggatctgatgcagaagaagatacccgagtcttttgggctttcttttgccgacattatgaacagaggcatggcctgggagagtgacccggtgttccagaaagcatgcagaatgtttcagaaggccgccaaaatctatgcgatgttttttaagcaggagggttttacagaagaacgggagtaccggtttgtgtttaaaaagagtgagggcatgaacgtgttattccgggaaaaggaaggttttttaattccctatataaagattaccatgctggaatcagacaataagctcccgatccggggaattaccgtggctcccaagaatgacagtgacctggcgagaaaaggaatggaatattatctgcatatgcacgggtaccaggttccggtagaactgtccaggataaaactgagatactgataaagttgtaaaaaatttgataaaatttgaatatttgtgatatacaaaaatcttctaaaaagtgataataacttcattacgttaaaaatttcacggagggtttttgttatgaatatgtatcgctggatagaaaaaatgatttatgcggatgagaaaaaaccaatgcctatattatcctttccgtctgtacagcttttgtgtgtcacggtgaaggaactggttgcggacagtaattaccaggcgctggggatgaagatgcttgcggataagtatgacacggcagcggcagtgagctttatggatctgtctgtggaggcggaagcgtttggcgcgcgctgtgtgtatgcggcagatgaagttcccacgatcatcgggaatatagtgaaaacagaagaagaggctgagcgtctaaaggtacccgaggtgggggctgggcgtaccggggtatgcctggagggtatccgaaaggccctgaagcttatcacagatcgcccggtgttcgccggctgtatcggtcccttttcacttgcagggagactgatggatgtgaacgaggtgatgctgtactgctatgaggaaccggatatggtacacacgattcttcggaaagtaacggactttctcattgcctatattctggaatataaaaaaacaggggcccacggaatagttatggccgaaccccttgccggtatgctgtccccacagcttatggaggaattctccagtgcctacgtaaaagagatagttgagaagacacaggatcaggggtttgtggttatctatcataactgcggcaattatgtgatccagctaatcgatcagatactggataccgggtgtctcatataccatttcggggacagcattgatatgaaggagatgatgcagcgtatcccgaaagactgtctggctatgggaaatgtaagcccttccgcacagtttctcaacgggacaccctcttctgtgaggatagagactatgagggtgctggaaaattgtaaagaatttccaaactttatagtttcttccggatgcgatattccgccgctgacagaatttgagaatatagatgcattctttgacactgcaaaatcattttattataaacagcatttgctggatatgattgtataaataagatatttatgatattctgagaaacaggaaggttcaggctttggccgtggaatcctcctgtttttctatgagaggacaggaggggagaacaggaaactagggaaagcacaacaggagaattggaatgtcgggacatatgtgggaacaggtaataaaatacagcagacatcttgcggaaatatttggcgtggagtgtgtaccggtaaatcagggggaccaggagcaaggtgagaataagtgggaaccaggggcgatatgcagagcatgcgaacagtgcaatcattttggatgctgggggatgaacgcctatcggaaaggctgcgaggaggcctatcgctgggatggcatctatatttccctctgtcccctgggacttatattaattacagcgccgctgtctgatgagaccggtgagctggtgggggggatcgctgccggtcctctgtgcatgggcaacccggaggataattttcaggaaatttacgatccagtccttcagagaatagtatctgagagtccctgttttgcaccggagaagatacagagtatgggcgagataatgagtgcggtaaccgggtatatttccggggttactcacgggaaagccggcaggtacttttacaagcaggaacatctgctcaatgctatatatgcggagaaactccggaaaacagaagacacagagtactatacttatcccattgctctggaacgaaaactgaggatcgcagtgagaagcaaggcagtggaggaagctcaggtgctcctcaatcagatccttgcctatatttatgtatctaactgtcataacctgaaggcaataaaacccaggctgtctgagcttgtggtagttatctcccgggcagcggtggatgcaggggcagatatgaatgagacggatgcaatgattcagatgtttgtaaaccatattcacgaatttgagagtattgaggagctcagtatatggaccactaacttgatgcagcagctcattgcctatacctttaacttcgataacgtaaaacatgcggatgtggtgtacaaagcggttgaatatataaaggataattacagaagaaagataaccgtggatgaattagctgccctcacatacgtgaacaaatcttacctgggcaccatatttaagaaggagacagggagcaccataccacagtatattaatgaagtacgggtagaaaagagcaagctccttctcttggaggagaatctgagtattgtagagattgccagcctgtgcggattcgaagggcagagctatttcacgaaagtgttccgggaaattgtggggatgactccaaaaaaatatagggaggagagggggaaaaagaggtttttaatagacaaaggagataatttgtgatatattgaatgcaattcaggtgtgtctgggtacttgaatgattgtaccagaaaactgccggatacagagagatacaggtcaactgcatctctctgtatccggctttttgtattcctgaaaggttgtctggagctttggataaacagggaaaggagctaacaatgtatttgatgattgacaattatgattcatttgtccacaatctggcggcatattttaaagaactggggggtgaactggagattgtcagaaatgacagtatagatccggaacaggtggagaagggggttgcatccggcagactggaagggattattatctctcccggtcctaaaagtcccagagaatgcaaaagtgtgggggagatggtgaagaggctggcaggtaggatacctattcttggggtctgtcttggacaccagatcatagggcaggaattcggcggtcagattaaaaaaggagtgcggcccatgcatggaaaggttacagggctcgtgcataacgggaaggggctctttgaggggctgccggaaacctttcaggtaacccggtatcactctcttgtgatagacaggcatacgcttcccggctgtatggaggccgatgcctggtccaaagacggagagattatgggaatgcaccacagaaatatgccggtctatagcgtgcagtttcacccggaggcagtactcacagattatggacatgaacttctgcataattttttgaagtgtgcggggcagtggagggcagagcatgagtacagcaattagaaaattatccttttaccgggaaccagaagatatcttccgcagattcaggaaagagcccatggccgtttttttggattcatcccttgagaacagtctggggagatattccattatagggttatacccttatttatgtttcagagacgaagacggcatctgttactgcaataacaggcggacggaggaaaaactggaatggcttctgcacaaatatctgaaagaaaataaggaggctaaccccaccagcctgcctatggtatccggggcagtggggtatctcagctatgattatggaaggaagtttgaagggatacctacccggcatgagaagaaaattcacatgccggaggcaatgttctgcttttacgatgtatatattataggggatctggaggagaagactctctttgtgacagcaagaggggagaccggaagccctgaggaagttctggacagagtggaaaaagagatagagaaggcttctcacaggaggggctgtcaaaggcagacaaagctggcggaatttcagccaaattttacaaaagacgggtataaacaagcaatagaagagatgatggaatatatggaggaaggacacatctatgtggctaatatgacacagcagctgacggttgaaagcaaaaagaatccttatgaagtcttttcctatcttcggcggcataatccgtccccgtttggaagctatatgaattatggagacttccaaatcgtaagtgcatccgtggaacgcttctttaaaataagagacggtattatagagacacgtcccatcaagggaaccagaaaaaggggagagactcccagagaggatgaagcgctgcgtctggaactggagaactctgaaaaggacaaaagcgaactgctgatgattgtggatttggaacggaatgatctgaaccggatctgcgaacccgggagtgtggaagtgacggaactatttaaggtggaggaatacgctacggtatttcagctggtttctgccgtacagggaagactgaaagaggggctggacggaatggatgtgataccggcagtattccccggaggctctattacaggcgcgcccaagataagggcgatggagattattgatgaactggaacatgaccgcaggggactctacacgggaagcatcggatacctgtctttttccggcgactgtgatttgaatattgtcatccgtacagctgtctatgaggatgggagatatcatctgggagtggggggcggaatcacttacgaatctgatgtggaatttgaatacgaggaaaccttacaaaaagcaaaagcaatcttggaggcagtatatgaataagataaaagcggacgacgggtacttttttggaatcggggtctttgagacgatagccattgagcagggcaggctgatttttttagaggagcatatgaaacggctgagaaaggggatggaagccctgcacattccccatccccggggcagggagaagctttcaacagagcatcttctggaaactgtccggagaggaggcatggagaaaggcgccttaaagatagccgtttcccaggaaaatgttacgctgagcttccgggagaacccctataccaaagaacagtatgaaaaggggtttttgctggatctggcatccactgtgaggaatgagacttccccctttacatatttgaaatcactgaactgtggggagaatattctggaaaaaagagcagcccgccgcaggggaatggacgaaccagtctttataaatacgaaaggacagcttgcagagggggcaacaaccaatttgttttttggaaaaaatggtagactgtatacaccgcccctgtcctgcggcctgctggacggtattgtcagaaagttcgtgatgcaaaagtttccggtggaggaaaaagtcgtttatccctgtgaggcaggggagtacgatgaaatgatggttacaaattccctcctgggtatcatgccggtgcacagatttgaagacattgccttctcctcccggaccttgtgcagtatgctgacggaggaatatgaaaagtgttctcaaaacagtcgttttctgctataataaagttcatatacagcatttttgtcaataataacggacgtcaggatacccataaaatgctgtttttagtatcagacgttactactatgaaagaaggtgttagcatgaactgggcagaaaatttacaaaacaatcttactacagcagagcaactcaaaggcgtattgcaacttaacgataaggagacggaaaagctaaagcagatactggaacaattccccatgtccattacccagtactatctatcactgattcattgggaagacgaaaatgatccgattaaaaaaatgtgcattccctctatcagggagacagatttggacggaagctttgataccagcggagaggcagacaataccgttgtggaaggaatgcagcacaaatacaaacagagtgccatgattttatccacaaacaggtgtgccatgtactgccgtcattgttttagaaagaggctggttggattgtcagacaaagagatagcaaagtatttcgataagattatggaatacatagaagggcacacagaaatcagcaatgttcttatatccggtggggatgccttcctcaacagcaatgaggtaattgaaaagtatctggagcgcttatgcagaatggagcatattgattttatccggtttgggacaagaacccctgtggtgctgcccatgcgaataacggaagacaaagagttattggatattttgcagagatacagcagcaaaaagcaaatctatgtgatcacgcatttcaatcatcccaatgaaattaccagagaatccaaggcagccgttcaggctttgctgcatgtgggaattcccgttcgaaatcaggcggtactcttaaaaggaatcaacgactctcctcaggtgctgggtacgctgctgaaaaggcttacagcagcgggagtgctcccgtactatgtatttcagtgccgtccggtcagcggagtaaagaaccagttccaggttcctttaaagcagggctttaagatcgttgaggaggctaagaatatgcagaatggaatggggaaaaactttcgttatgtcctctcccatgaagcaggcaaaatagagattcttggtatgaccgcagaggatgaaatgctgtttaaataccatcaggccaagaagccggaggacgcaggcagattgtttatcaggcacctggaggatactcagtgctggctgtaaagagaccaattaccgaagtattataggtatctgtttacggagggataaaggctgggaattactcccagcctttacatacgtctatccagcctttgcttccggcgcaccgctccagatcctccatggtcagttcaaccgcactgctgtcattgccggcaccgggaaatactgagggaaatctcttcagggagacatccagatagacatccaccccctcattaattccaaagggacagacgccgccgatcccgtgaccgataaggggttctacctcctgcgccgccagcatctttgcttttacgtgaaactgattcttatatttgacattgtcaatcttggcatctccggcggtgagaattaagatgggcttgtcctctgctttaaaagacatagtttttccgatccgcgcgggttcacatcccacggcctgtgctgcaagctctacggttgcggatgaggtatcaaactccataattctagaatctaaaccgtattgtttcagatgattccgtaccttttctatagacattgctgatcctccttttatctcattctgtcataatatggtgactttcctctggctgaaagggggatgccgataacgtctgttacatcctctccgagaattccaagctccatagccgctctcccggctgaaaacattacccggttgtcaattctggcatcagcagccacactgactgcggagcctatggcaatgcccagatccatagggccgaacgcacacattcctccggcctccatacaggcactgcagttttcaaacccgcagtagcggcatccgtcgttcattttatgggcctggtttttaatgccaaacaatacaacagcaaagctgtcacgtacattagccgcatctctcatgaaaaagccataggacagtttcggggatagcgcctccatctggtttgccaactcctctttttcttttcctgtcagaatgcaggcagccagatagtcctctccctttgtcttgggggcggttctggcagcagcacacatcttacgggcaacatgtattacggcggcttcttctgcctctctggaatgctgtatcatattaaactcctcctttccgtgttacaggtgaatcatgcagccggtaagcagcatgacggtaaactaagttaatggtaacgaaagcgggaatagttgtcaagcagtaagagaaaagtaatcatatatgcgagagtggaaattatagcgtataaaataggagggccggtacgaatgaggtaccggcgtatatgaaaagaaatctatatgaaaaaggcagctggcctttatttgattatcactataaaagaaaaatgtgttgattctgtgatagaaggtttaagaaagtgtaaagactatataaaaaatgcatacatatgattttagcattcctgacgcagcagctgatacggcaacaagagtggaaccaatgataggttaagggtaacatactgaacaggtatggataattaagcataaagaaccaccggttttaaaccgatggttctttatgcttaattgtcgatttcaaacccgttttccgttgcatgaagctggaatttgaatcgcatcacatcgcccagccaataagtatttgaatattccagcggtgtgccatccttcatataggagatacctttcagaaggattaatagagattcggatgttgtatttaacagcagagcttgcttgctggtaggccggagaacttccagatagtctgttattctttcaggcacaagctgataataagcatttaatgttttggatagttttccatctataagtccccgctcctgaagctttggtgtcagacaggcaggaagccatgagtcacagattgctataggccgttcgtccagctgaaaaagccttttaatataaaccaccggggagtcctgggaaatctccagattttcgtatacttcacttcggggagctgtgaacagctgcagctccaaaactttagcgtgcatctcaaacccttggtgattcagtttttcccctgaaataatactatagtctaaatcgtgtataaatgcctggggattggcgctgacaaaagctccttttcccctctgtttcttaataattccatccttctccagttctgccagagcctgccgtatagtaaccctgcttacatcgtactgggccgacaactctgcttcactgggcagccggtcattaatatcccattcctttttcgtaattcgttcctttaagtcaagctctatctgataatatgcgggaataggggaattgcgatctaatgtctgtcccatattgctccctcctttattgttatgtagttattacaagcagacaagattatatattgattctacatactttcttcctaaatgtcaaacttatttataaaaagtaaaattgcacaagaaaaaataattttatagttgatagttgacacactttacaacttgtgttaaagttaatacaacataacaagcagacaagatgtaaataaatggaaggaggagatattctggaaaaggaaaggatttcagtaataggagcagcagctgtatgtgattacatatatgaagtaagtaaactgcctggaccaggagatattgtggagattacaaaagaatatccagatccggtatgggggggatgtgccccgaatattgctgttggtattaaaagtatcacagggattatccccgaccttttctatccggtgggctatgactataaagacagcggcttagaggattattggaaagaaaaaggactgaattgtgaaaacattacaaaagtagaaaactgccggtcgggatatgctcacatgtacatgcagcaagatggaaaaactatctgtcttggttatgcaggggcggcccaatatgggagggcagatgcaaaagcaaaattaggagattgggtggtgatagcccccatgttgaatggatatacggaagaatatctgaaacgtgggatcgaagagaacaaatcctgtatcgtaaccggtatatgctcccgggaactgattccctatctgcccggtgttaaggcggtaattattaatcagcatgaggctgaatacctgatgaaacatctggagtttcacagggaggaagaactggcagcttatttaaacgggggtctgctgtttattacaaacggtgagaagggaagcagagtctatgagcagagtcagatgacccgggtgcctgtggtaacggggacgcagattgtagatttcaccggcgcgggggatgcctacaccagcggggttgtgtcagctttagcagtgtggggactggaaccggtgctggcaggctatgtgggggcggccaatgcaagttttgtattggagatgacaggtgggcagacgaatctgccggactttgagcagttaattgaaagactggagcagacatatcctgtgacagcacaaaaaataaaatgtaagagaggataaaaaatgaaaatcagtaaaatggacagaactttgggatgcctttacgggacagcaaccggagatgccctgggtgtaccttcatcttttttgacacctaaccgcatcagggaattatatggatggattgataccttttatccgccggagaaaggacatatctaccatgacggacttctggcaggggaatatacagatgatacggagcaggctctggcactgacccattcctttctgcggtatcgtaaagtggttccagaggacattgcaaaggaattggaaaaatgggcggatcgggtgaaagataaatacgccagtccttttggacccagcacagagcgggcactgaaagcgatacgggaaggctgccccatcggtgaatccggaaaatatggcaataccaatggctctgccatgcggatcagccctctgggaatcatccacgggctgcgggacagctctattgaggagattgtcagggacgtatatcagacatgtcttgtgacacataacacgaaagtagcagtatcctcgggagctgcaatcgcatggggcatcgcagtctgcatgaaaggggagaccgatatcggtaaagtggtggaagaaactataaaagcggcagcagcaggagaagcctacggaaatgatattccggctccgtccattggcaagcggattgattatgctgcagatctggcatttaaggcaaaatccccgcaagagggaatggacgccatttacagctactttggcggaggagatctctgtgcagattccattccacagaccatcggactttttgtcctgggaaaaggagatcctaagaataccattgagtatgcggttaatatcgggggtgactgtgatacgaatgcggcaatggcaggggcaatggctggagcgatgaatggtgtggatgccgtaccgctggtatggagagagacgattaacaaggtaaatcatatagacatgacgccagtggcagaagatttgatcaacttagcacctaaatggcaggtggctgaataagaagtggaggatcggatatgaagagaagagtattatctttagtattagcattgtgtatggcagtaggaatggccggatgcggcagctcagagaaagagaagtccggtaaatcagcatcggcagagggagacagaaagcagatttccatgtggttctggggctgtgccaccccctatcaggaacacatgcagaaggtattggtggacagttacaacgagtcacaggatgaatactggctgacactggaattcagaaatactgtggacaaagatattccggttgctttggcagctgactccggcccggatatagtatatgcttccggtccctcctatgtatccacctatgtccaggagggaaaggtaatcagcctggataaatatgctgagcagtacgggtggaaggacagaatgctgcaaattctatatgatgcctgtacggtagacggaagtctgtattccattccgaattctatttctgtgggaggaattttctataacaaggctttattcgaggagaaaggctgggaggtacccactacagtagaagaactcacaactattatggacgaggcaatgaaagacggattgtatggatctctggccggaaataaaggctggaagccctgcaacgataatttcagttctcttatgatcagccattttacatatccgtctgtgatgtatgactgcctcagcggtaagactccttttaacaatccagaaatggcaggagccgttgagctgtcgaaagagtggtatgaaaaaggctatctgggagggtctgactacacggatctggattctcaggaatgtatgcagatgctttcagagaaaaaatctccttttgtccttgcgcctaccttgtatttccagtttgcaggacagttctttaccggggaactggaagatgatcttggttttgctccatttccgtcccttcagtctgatcagccgtcaccagtgtatgatgtggctaccccctgtaacttcagcatcagtgccaccacaccctacgcggatgaatgtgccaaaattttagacactatgctgacagaggatttcctggtagaaatgacaaaaggatggccgggatactgggcaacaccactcaaagagattacggtagatgaaagttccattgaaggattgggcggtgaatttataggcgcagtaaaagaagcctgtacggcaattgataacggacagttcagcttccatccaaccacgtttatgccgcccgaaacccaggaaaagtggagagatattgatatggtttggcagggagttatgacgcccgaagagtttctggattctgtggatgccgtgttccctggtgaattggaaaagaatctggtgagcccattggcagagcctgccagagcaaagtaaatgggagtaataagggatgagcgatagaaagagtaaaagagaaagaaaaacaggttattacttacttgccgcacccgctatacttttaagcctgtctgtagttttgattccggcagttaccactatttatgcttcgtttacggaatggaacggaatgggagagatgaagtggataggactgcagaacttcaaagatattctgggtgatccaatctttataacatccttgaagaataattttaaatggacgcttatttttctcatcgtcccggtaaccataggaatggttgccgcagtactgctgatcaacatgaagaagaccaagaatatgtttcagaccttttatctgatcccatatattctggcgccttccaccaatgcggtaatctggctgaatattatgttctctcccaatgcgggagtcatcggatatctgaaggatctgggactgaatatttcatcgccgttaggtaatatgtcttccgcactctacggtgtagtcggagtagatatatggcattactggggctttttgaccgtgatttatctggcggctctgcggcagacaccaatggaccagattgagtcggcccgggtagaagggggaaatgcatggcagatctatcgttatatatatctgccaaacattatgcctactgtaaagttaatgtttgtaatgattgtaatctattcgttcctttcctttgattacgtatacctcctcacaggaggaggacctgctcatgccactgaattgctgagcacctttgcctacagtacggcattttctgcctttaagtttggacgcagcgccgcagtatctgtagtgatggggttatttggaagtgttgcagcattttgctatgtttggataagcagaaaggatgtggctgaataatgaaaaagaagcaggtcattcatagagttattatagtagttattctggcggttttatcagccattgcccttacaccggtgctgctggtattggttaacagttttaagacgcatgcggagattgtggcgaatcccctggcctggccgaaagagttctccatttataattaccggcaggcttgggagctgggcaagttcggagaaggatttgccaacagcctcaagctttccggaaccgctgttgtggtaggagtactggcgtccgcgggatgcgggtatgtcattgcgggaaagaaaattaaaatgtggggtatgatcctgatttacttcatgctggtgacaactgtacctatgcagctgtttttactgcctttgtactctacatttgtcaaattaggacttatggggaatccgtttgccgcaggagtagttattgcggcatggaatcttcctctgcctatctttctcatgcggacgtttttccttaaaataccaaaagatctggaagaagcggcccgcatcgatggggctgggacctttcaggtatttaccaaggtgatgctgcccattgtatcaccgggaatgataacagtagccgtaatagtggcactgaattcctggaacgaatatttattaagttctacactgctccagggagagacaaattttacggcaacaataaagtttttaaatctcaatggaacattctccagagatatgagtattatcatgtccggagctgtgattatgatagttccggtggttatcgtattcctgctgctgcagaaatattttatcgaagggatgaccggcggatctgtgaaaggttaaataataatattggaggttagttatgataagtcaaacatacggagaacaaatctatgcaggagtgctgggcaaaatcataggagtatatatgggaaggcctgtggaagggtggtcctatgaaaatatagtaaaagaattcggcaaaatagagaattttgtggcagagcataatggcttccctctgatagtcccagatgatgacatatcaggtacgtttgtattttaccgtgcacttgaggacaatggatatccgaaagacgtgaccgcggatcagattggacagacatggctgaattatatcatagaagataaaaccattctctggtggggaggcctggcaagatccacagagcattccgcatacctgagattaaaacagggagtgaagcctccgtacagcggttcttttgaatataatggacaatccattgcggaggccatcggatcacagatctttattgatacctgggccatgagcaatccgggaaatcctgaacgcgcagcaaaaatggcaagagaagctgctattgtaagtcacgcggggattgccgtggaggcggccgtgtatctggcagccatcgaagccctggcttttggcatcaaagacgtggatgaactgctccgcagtgccagaaaatacgtacagggggaatacggggaaaaactcctgaagcttgtggatgatgtggtggaacagtgcaaccaggcagcagactggagacaggtacgtgactggatccaggagaatcacggataccatctgtatccgggaaactgccccatggtgcccaatcatctggcggttatcatggcattgaaaatggcgggggatgatttccaggagagtatctctatcgctaccagcgccggctgggatacagactgtaacgcaggaaatgtgggatgcctcaacgggatccgcctgggtctggatgccatcaatcacggcattgacctgaggggccccgtggctgacagaatgctggtggtaagctccgatggggggtcttgtatctccgacgcagtgcaggagagcagaaagattatcaaagcagcctctgccctggcaggggaagctgctgaacttccggagaataaatttgcatttgaatataggggatccacccagggctttatgcttcacccggaacccattcatgtacaggcagctacagaagtaaaaaatgcctgggaagaaaaaggagaagccggacttcagattacatataagaatctgagcagaggagcaaaggcctccgcatcagtggcaacctttgtggatcctgcgccaaaggcaaaagccgggacttcttattttgaagtatatgcaagcccttccatttattccggccagaccgtgcacatgacggtaaaatgctttgaagaagaaaatcctgatttgcaattatttattgattactatgaccagaatgacagtatcagcactatagaagggtctcctgtaagattagaacaaggtatgaatgaaattacctggaaggtgccggataccacaggccgggcaatctaccgactgggaatccggctgaacagcgaccgtatgctcaacggtgctgtcgtggtaaaaagtctggactggaaagggtctccggaactcttccatatgggaaaggccaatgaactgacaccggggatcagcccctttgtgacacgtacacagtggctgtcagcatttatgacgtcggtaaaacactatggtccggactatctggcaaccatttccctgtcccatccggaagaaaacggggtaatgaccataggaacgacggattgggatgattattccatagagacaaagcttcagtttgtacacggcaaatgcgcgggggttgtggcaagagccaaaggccacagaagatactatgcggctgtcttccgggacaacaaggcggaaatcataaaacgctttgaccgggatgtgatatctctggctgccgctgcgtatcccaccacagatgacatgacacatgagataagactggaggcaaaaggaaaccggctgaccatgtttgtggataatgaagagaaagttacctgtacagacgataccttcgcaaacggagcggcgggattcatggtggatgagggcgctatcgtggcggaatgcctcacggtaaaaggaatataggggtttgctggtatggaatacgtaatcgtatcaaccgcagttatggatgatatgaccctggctgacggaacgtatatgggaaagctgctggggggagctggcatctatgcactgtgcggagccaaactgtggacggaccaggtgattttagtcaccggggccgggcaggatctgtatgacaggcataaaagctggtttgagaagaaccggctttctatggagggaattaccataaagtcagaatgcagtccgatttcaatcctgcagtatcaggagaatggggagcggacagaagctcccctctacggagcaaaacactatcaattgatggaggccacgccccgggagatagaaccccactgcagggaggcaaaaggggtatatatttttaagggcacggattcggagtattggaagaaaatcctggacttaaagaatcagtatggcttccgtatcctgtgggaactgaacggagattatgcctgcccgcagtatatggatgctgtcagaggcatagcggaagggatcgatgttttttccattaatgcaggggaagcaaaaaggctgtttgggtgtgaggaggcagagactgtggaacagctccgagctcttggtgtgcccctggtctattaccggagaggttccaaaggggcttatgtgatatctccccgggagattcagaaagtacccggagtacaggaccttgcggttatagatgccacaggagggggcaatagttcctccgccggagtactatacggctattgtgagggacttgcaccgaaagaatgcggtatcctgggcagtatatccgcagccgcctgcattacccagtattctgtcccggaaagcatagatgacggccttcgcagaaatgcccacaggctgcgcagacagatgatggaggagtagaggattgggaaaattaagcgataaaattagggaaaaagaatccatcagacagattcatgcacagtatgaatatgataaaaatatcccggaaaagggattttatatccaggggaaaccggctttgacccagatagatacctcccaggtgggagagtttgtgctaatctgtgtcagggatgctctttgctcttatgaccaggacccggccaaagtcattgccgggagaatggaacatgcccgtatgataggccagtcgggaatgtatctgtcctacagcggatattacaaaggcgcacatattaccgtggtgagcggaggcagcggcgcacctgagatggaaatgattttatatgactatatggaacatacggatgctcatacctttctgagagtaggaggatccggaggctttggggatgaggtgaatcccggggatgtggtgatttccagcggggcggtacgggcagagggaatgacaagatcctatatcgatgccggatatccggcagccagccattatgaggtggtctgtgctatggtggaagcagcggagaagatcggccatccctatcatgtgggggtgaccgtttccagtgacagtgactatgtaggcgggggacgccccggagtaggcggatatcttcagccggataacatagaaaaagcagggatctacaaccgggcaggctgtctgaacggagacagggagtcttccgccatcattacactgtctgccttgttccagcgccggggaggctctgtgtgttccgtggcggataacatgtgtaccggaaaaacgttcagcgccggggccggacataacgcggcagtggatattgccctggaaggctgcgccatactgaagcggatggacgaagaaaaaaaggggaaaccatactggtatcccggactggggcataaataaaaagctatgaatatgaaggatgaaagcaaatgaaaaaaatagatgcaacagaagcaaggccgcttatctgggaagaactgagaaaagtggccaggccggactcccgtttcagctgggagttcggggaatttatcaccgattacgaaggcagcggcgagggtgcccggcggttctgcgagaccgagctgtatcagaacgcggaggtgatttttgtaacaccggacaacaacctggaacgtctcagagaacaggtgatccgggataggaaaactctggtgatgacaaattatgggattaccagaggcttttttctggtaacgcctgacgcggttccggaggggaaagaagagcttgcctctttgctggacggggtgggaagatattggaagcatcagacgctgaagcaattaaaagcgtctgtgggaagaatcgacgtactggtgtcaggggcttccgccattactccaggaggcgtacggtttgggaaaggacatgggtattttgatctggagtgggctatgctgtacaccatgggaattgtggatacagagacaccggtggtggccgcagggcatgactgccagatcatggatgcggatgtggctgtgagagagtttgacacggccattgattatatcgtgacacctaccaaggtgataaaaaccaggaatgagtatcccaaacccacaaagggaatcatctggagcctgttggaaccggagatgagagcacagattccgccattgtatgagctatggtgtaagattcactgcaaataaggaggaatggatggaaggatatgataacccaataagaaggcaggtgttcagcctgccggaattaatcgaacagcaggtcagtgacctgatacctaaaattgcagacctgtggaccccggaggaaggggagagtattcaaagaatcatcctcaccggatgcggggattcctatgcggcatgtatggcccaaaagtacaccttcgagacactcaccggcatccccacagaggtagttccggcccttgagctgggcaggtattactgcaaagagcagttcgggcgggagaaggggaatcccctggtgatagctgtcagcaattccggaaatgtggctcgggtctcagaggctgtgcagagagtcagaatgcatggttctatgaccctgggaatcacaggaaaccgggactcggagctggggaggcacggagaaaaaatcctttgtacgcagatcccgccttttgaaagtgcaccgggaaccagaagctatcttgtgagtatcctggcgctgaaccttctggctgtacgcttaggagagctgagaaaagactatacaacagtaatggcggagcgttaccgggaagatatcagaaaccagtcccgtttgttaacagaactgcttccccaaatggacagaaactgcctggagattgccaaccagtggaaggactatccctgctatgaatacgtgggggcagggtttgactatgcagcggcctggttcggacaggccaagattctggaggcggtgggacagtttgtcatgcactgtaatgcggaggactggcatcatctgaacttcttcgccagggaggcagataagataggaacggttgttgtctgcaatacggccaatcccgccttgagcagaacgaaggaaatggtagggcatgccaaaaagctggggcgtccgctggcaattataacagacgggggtcctggggattttgacagtgtaagggctgcctatattcaggtacccaacccagtctatcccattcatatgcctgtcacgcattttgcccccctgtgtctcctcgcaggatatctgtcagccatgaaaggagaaacttatggaagaggcagtgaaggtccctgggagttcagcaagggcggccgctgtgtgaaagatagtaaaattgtaatcaggcaatagagggagagaaatcatgttgtttttaagaaagggcgctctttatctgggaggaatgattattctcacattggggcagagactgtttgtggaggctggctttggagccgacgctctggatgctctctgtgtgggactgtctgagagtgcgggccttacccctggtacatgggtggctgtcaccgccctgctcatgatgtgtacagcggcagtcttatccggaagaaaaccattgacaggagggttggtatcctcatttatctttggcgtattctttgatctgtgggcgcgatttttccaacgcttttatgaaccgggcagcgtgggtatccgtatcctgatgtatggagcaggtattcttttaggccccctgggaacagccgtttattttaaaagcgggtttgcaaaaagtgctttggatgattttatttttgcaataaaagacaggctccatctaagcattagagtgacaaagacggctgttgagattggactgtgtacattggcgtttttgttcggcggacctatcggaattgcaaccgttattaccgcagtactttacggtcctcttctgcagggatttatgaatagactggacaatatgtgcacgatatgtgtaaggagtggaatacatggctttgttaagaaaatttgagataaccacagcgtataatgatatttgcgatattacagatagtataaaggaaactgtgagtgagagcggggtgcaggagggaatttgcattgtatataatatgcactctactgcgggactgtcagtattctccccctgggatcccgagggatttaaggacttgagggaggaaatttgcaggctgatacccaccagaattgactttcatcatcagcatgacagtccgcaggatgctgcgggccatgttaagtcagcgctgctggggatagagaggatatttattgtccatgagggaaaactgctggttggcggttcccagggaatctatttcctggagttcgatggaccgaggaacagggagtattacgtgaaggtgattggagacgcataacttatttatcattcatcacgaatacccttgaaaaaaatggataaactcgctataatctcgtctttgacatatgtaggaatacataagtgccacaaccccttcaaatttctgggattgtggcactttatactccgtgcacgaaaatatagtaaagttttacctgtgtttactttttttctgaatctctttcatcttacgttttgttaaaaactgttagtctgtccgaaagctgctggaatgccgtatcatttaaatttctccttttcagtttcaggttaagtaggcgtttgcgaaacgtctacttaagttaatggcaacgaaagcagaaataattgtcaagcagtaagaaaaaagttatactaataaataaaagcaggagtattgtcaataggagaacggaggaagtggggggctgggggattggaagattcaagaaagtataaagactaaatataatttaggtattttatgtcttctatgcgggtataaagaacagaaaaaatgtatgcgaaggagaaagagtgatgaagaagagagcggcaatgctgatggtactatgcttattagcagttactatcagcggatgcggacaaaaggcagattcccagaaagcgcccgatgaaacaacagccaaagctgagaaaagcgaatgggaagataacagtaaagaagtggaggcattgaaaaagttatctctgactgcctatcccggcagaacaattggggaggcatttaccggagaatacgaagtagctgaatggaagtataaggaggaaggcggaaagaaatttcttaagtgttcttttatccggcaggaaaaggaatatagtctgacaatttatcaggacgaatatgagaatgtaaatgcggcagagtattatgccgggaaggaaaagcagagtccggaagaaatgcagaaattctgccaggagctattttccctgggggagacagcgtcttctgaaaactctcaggaatttcccgagagtcggggcggatattacagcaacggatactgggcaatggatctgaagagcattgacaacatttcgggaacagttctgtatgatggttatgagtatgcatacagccctacgcaatttgcctgcaaagatcaggggggaaaaattattgacggaaataccttggaatttagcggtgtgaccattacctgggagggggactcctttactttgacggagggaatggatgctatgattatgagcagcatggcgggaaataaccatgacacggaacacggagccgggaagtatgtaaaaagcgaaagaccaaaggaagatgatcaggaacagggtacaggcacggcaagaagtattgaactgtatgccggagagtataatgattaccgctggttcggtgacaatccaaattgtccggagaatccatgcatgatttccgtatcgaatgttacggatactgcctttgacttcaggatagaacagtgggatccgtcatcgaattcattcaatgtaatctttaacaagcatacggcagtatttactggagacggaacaacagctgcatattttggaaaggagtatacactaaactttacatttcctgatgtaactaccattgaagtttctggatttgatccaacggaaggcatttcttatatgtgcaacgggattcccggacatgaattcagttaatctatacccgtttgtgtaaaggcagatacaactttgcaagatttttattcaagaaggggcaacattcaaaagacattaaaaggtatggttaaacgagctgtgttttgattatatattagactgtgcggttgatatattgacggaaagtattataaagaaagttcacattatactaaagtcaaatacatctgatagccgtttagaatggtttaatgtaggggattataagcagcatcctaatatgggtgaagtttctttatcgatttgagagaatccatccgttccagaatggaaatggaagagtagggcggtgaataatttttgaggaatgtttaaaacacaatattgttccttttatcattgatgaaaggcatgaactatattattacagaggactaaaagaatttgaatccgaaaagtgctatttgatagatacgtgtttgtctgctcaagatgcatataaagaaatgctggaatttttttcagaggaatgaaaatataagatttgaataaggaaactgtagaagcaatcggaaataaaatctggttgcacaaaaccccttgaaaaatatgggtaaacgcgctataatttcctatagaataaaagaaaattcttcggggcagggtgtaactccctaccggcggtgacagtccgcgacccatgcaaatggctgaactggtgtaattccagtaccgacagtatagtctggatgtgagaagaaggtaatatgatatccatcgtttatctgccccggatgctgtatccggggcttttttcgtaagaatttccttttatgctgactaaaataacatgaaaaaaggagagaacgaaaatgagtgaacaggttgtaagcaacaaaaatgtaaggaatgcccacacggcgaacagatcaaagatcagaactatggtacagattggcatgctttccgctatagcagtgattctgatgtcttttgaattcccccttccttttgctccggcattttataagattgacctgagtgaagttcctgtactgattggatgctttgcaatgggccctctggcaggtgtgatcattgagctgattaaagtagttcttcatatggtatttgtgggaacgacaacagccggcgtaggggacgtggcaaattttgtgattgggtgtgcctttattgtaccggcagcattgatctacaagtataagaggaccagaaaagccgctttggttggaatggcaactggtactgcgattatgacggtgattggaggtttgtgcaatgcattcgtgttactgcctctctatgcagcggcattcggaggaatggaggcaatcatcgcggccggttcggcaatcaatggagggattaacggagtagcgacatttgtgctcctggcagtaacgccctttaatctggtaaaaggggttgtggtttccctgataactctgctattatataaaagagtcagagttttattaaaaggagagtaaccactatgggacatattcataaagtgacaccgctgacagagaataagcatcttaatatgtatgctattgacgcaaccagcaagataggcacgccggtacactattttgtatcatccagggcagagagtacggaagccctgaaactggtgacgggcaggaaccatccggacggtgtggtgatttacagcttgtacggagagaagaaagacagggtagtactggtgcgtcagtatcgttatacgattgatgattatatttatgaatttcctgccggcctggtggaacccggtgagaattatcgggaggccggaatccgggagatgaaagaggagacagggctggactttgagccgtttaaggtggataaggcctatgaaaaaccttttttcacaactatcggaatgacagatgaatcctgttcaacggtttatggatatgcaagcgggaccccctccaagcgtggattggaagattccgaggagttggagatagtactcgcggatcgggaagaagtaaagagaatattacgggaagaaaaggtagcaattatctgcgcgtatatgctgatgcattttctccatgaggaagaggagccttttggatttttgcaggaagaactataggcagtaagctgcatataaagagacaatgaaaggtgtcagattttcattgtctctttttgtatgcccaaatgacatcccataacacataacctgcagtcgggcattgggctgtgccgtatgaaatacatatacgaagaaatctaatgatacattatagaggagtatcagccggaaaagtctgttagcaataaagttgttgtggtcgaagatacaggggtgttataatactaatatttcgaggcaacaagagctaataagattgaaacaaagatgagaggaatgtgcggtatgtatgaattgagtaaagcaggagaaaagagctactatattaactgtcccgccaaaataggtatctacacagccggggataatgaggtgtaccttatagacagcggaaatgataaggatgccggacgcagagtaaaaaagatcctggaagaaaaccattggcatctgaaggggattttgaatacacattccaacgcagatcatattggagggaatcgttacctgcagtcccagacaaactgtaagatttatgccaaggggattgaagaagatttcacacgccatccgattctggagccttcttttctatatggaggttatccgtgcagggaacttcgccacaagttcctgctggcccaggaatgccagacatctccctttacggatgaagaatttccccaagagatagaagtgataccgctgcccggacatttttttgatatggctggcttccggacaccggatcagacggtttttttggcagactgcatcagcagcagggagaccttggataaatatgggataccatttatatacgatgtacaggcttatctggagacgctggataaggttgagcaaatggaggcggctgtttttgtaccttcccatgcagaagtctccaaagacattaaggagctggcagggtataatcgggacaaggtgatggaagctgccctacgtctgctggatatatgccggaaacccaaatgctttgaagtgatcctgcaggaaatatttcaccaatatgacctttccatgaactttgaacagtatgttttggtaggaagcaccattcgttcttacctcgcctggctcaaagataatgggaaattaagtatcgatttcagcaatcaaatgcttttgtgggaaacagcatcttaagaaaatcttaagaaatgattcgttttatctgaagatatgaaagatagaatagaagacggttcatttggagatcaaaatatccacttgacaaattaatatggaggtattattgtattatataagtagtacaataatacagcgaatgggatatatcgggaagaagagagaggaaagctatggaagcgttaatcagagtagagaatttatgcaagatatataatcccggggaaaatgaagttcgtgctctggatcatattcatctggtgatagaagagggagagtttgtagctattatcggacaatccggatccggaaaatcgactttaatgaatatgctgggatgtctggatgtgccgaccaccggcaaatattatctgaacgggacagatgtgtctaccatgacagataatgaacagtctgcagtccgcaataaagaaatcggatttatctttcagggatttaacctgataacgaatctgacagcgctggaaaatgtggaactgcctctcatctatagagggatcgataaaaagaccagaagggagctttccattcaggcactggagatggtaggactggagcacagaatgaagcataaaccatcagagatgtccggcggacagcagcagagggttgcaattgccagagccattgctgcaaagccgccggtgattttggcagacgagcctaccggtaacctggattctgcatccagcagggagattctaaagattctaagggagcttcacgacggcggcagaacggtaatcttaattacccatgatgacggaatagctgctcaggcaaagcgtgtagtccggattatggatggcaaaatagaatcagactttatcaacgagaattttagtgagtagcaggaggagtaagatgaaagcaggagtgaaaggaaagaagaaaaacctggtattgtacatagtaattgctgcagtagttgtggttctagtagtactggttttagtgagtaacatgatgaagggcaatacactgccatccgtcaatgttgagacggttaccaccggcgatgtgcaggaaaaggtggataccagcggaactgtggaaagccagaataaaaaggtatttttctcacccgtgaatgccgaggtacagaatctgaacttccaggtaggcgacagtgtcgctgccggaacacagctgattgattttgatctggagaatttggagagagataaccagaaggcagaattgaccgcgaaggcggggcagtatgggtataacgacagtatcaagaagtctaataaggcagcgaatgatgtggcggatgccaaggcaaaggttgcgaccttggagggccaggtagatgctaagaagcaggaagtggaagatcttactgcacagattagcaacgctcaggctcaggctgctgtagatgctcagaatgcagccgaagattcggcaaaccaggctgctgcacagtataagaaagacaaagaagcttatgataaagcgttagcggatgcccagaatgcagttacggatgcccagacaaaatataatcaggaaaagacaaactatgatatggcatatagcaaatgggattcctctaaaaccagcactaatgagcaggcagttaaggaacaggaaaaagtgcttacagatgcccagaacaaattggatgcggcaaaagcttcaagagataatctgcttaataatccacctgcataccaaggagcttccggaggaaccggggaagcaggcacagctgacaccagccagcttcagcttcagctccaaaatgcccagtcagaactggcagagcttcagtcggatctggccactaacaagtcggtggcagaaagcggagacgcaggtgttctttcagaggatgccaagaaacagcttcaggttaataacaacctcacagaattggaagctaagactctggatgaattaattgcagagggcaaaaagggaattcaggcagaattcacaggagttatctcagattccaaaattgtggacggcgctgcggtaacccagggtatggaaatgtttactttggagagtacggaggatgtaagtgtttctgtaactgtatccaagtacgatattgataaaatcaaagtagggcagaaggcaaaagttaccattgcaggtaagacttacgacggtaccctgactaagatcaacaaggtagctattcctaacgagaagggtactcctgtgttaggtgcgcaggttcatattgacaatccggatcaggacatctatctgggagtagacgccaaggttactattgtgggcaatgaagccaagaatgcagtactccttccggtagaattagtaaatacgggtaagacaggttctttctgttatgtagtagaggatggtaaggttgcaaagagaaccattgagacaggaattgcatctgattcctacattgaagtgaagtcaggactgaagaagggggatgtggtaatcacagattcaccggatacccttaccgagggactgcctgtagagactaaggaagccagcggccagacagatggtgaagcacagcaggatactgttgtggcagaatagtgcgtagtcagaacgaaaggagtcatctatggcacagcttttagaatatataaagatggcagtggagaatatcaaagccaacaaagggcgttcatttttgactatgctgggtattataattggtatttcatcggtcatcatgatcatggcagtcggtgcaggtactacggaccagatgaacagtgaactgaatgatctggccgcaggacagatatatatctataccagcgataaagctgtcagtaatatgcagtcaattacggaagaagatatggaagcgatccgtaccaaagtcaagggcgtggagggagtaactccgggctggggggagagcggacaggtatacacatccaaaggagaatttgatatttcagtaagtgtgggaacagccgatatgcagcttacatctaagcttcagctgatcaggggaagatacctctctgaggcagatgtacaggaagggcgaagagtaggggttataagcaaaggggatgccatccgactgtttggtaccgacgatattgtaggtatggatatggatgtcaccataaacggtattactcagagcgtaaatattataggcgtccgggataacctgacaaatggtaacttcgtttcctacacgtacgagggagcaccggttaatatcgatatgccctatacggctatggtagattatgacatcgaatatgacgggttctcaaatctttatgtcatcggagataaggtagtggattccaaaactatttctgataatgtcattcgtattctggagtccaggcatcagagttcaggggaaggctttttcctcatacaggactttaacgatgttgccgcacagatgaattccatgatgggtatgataacagccttcatatcatttgttgcagctatttccctcttagttggaggtatcggtgttatgaatattatgctggtatcagtgacagagagaacacgtgaaatcggtatccgtaagtccttaggtgctaaaacctcctcaattatgatgcagtttttagcggaatcggtgattattacggctctgggaggcgtcataggaattattctgggcatcctgggggcctttggaatctgttctgttatgagcggttctatgaattctgctataaccccggggatcagagttactacgatcctgctggccacgctgttttcctgtgcggttggaatattctttggaatctatccggcaagaaaagcggcaaagctaagtcctatcgaggcattgcggagaaactagcatacacaaataattaataaaaaattaacggatgaatcattttacagaacctgtcataggtgtataatacaagcatacaattactaaaaaagcaggtattgaaaatgaatgtaaccgtgaagaaatatataaaaagtatactggcctttttgttcactgttgtgggcattgtactaggcattttcatcggcataaaattcctcaggttttttatgccgtttgtaattggatggattatcgcattgatagccaatcctctggtaagatttgctgagagcaggatgaagattgtacgcaagtatacctccatgctgatcattatcgtcgttcttgggctaattgtgggggcagtctatctggcaggcagcaaggttgtggaggagaccgcaaagctggtggagcaggcacctgacatctaccagagcttcagccaggattataaagaggtggagaagaatctggatcgatttatcctggaacttccacagggagttcaggactcaattctggacatgcaggaaaatataggggcaaagattggagagtttgcttcaggtttcagccagtggacagttgcctatgcgggagatattgccaagcacctgcccaatgtgctcatcggcattattttcacgattctatcggcttactttttcattgcagacagagataagatcctggaatttggaagagataatacgcctatgtttatacagcggaaatggaaagtgctggctgacaatttcaggggtgttatcggcggctactttaaggcgcagtttaaaattatggctattatctggattgtgctggtagtgggatttatgtttatgagggttaagtttgccatatttattgcattcttagtggcattcttagatatgcttcccttcttcggaacgggtacggctttgatcccatgggcattgttcaggattctgtcaggagatatgaaaatggcagtggagcttacgatcttgtatctgtttacccaactgctgcggcgtattctggaacctaagctggtaggggactccatagggatagatcctctggctacgctggtatttatgtatgccggttataaactggcgggtgttttgggaatgattttggcggtgcccattggtgctattatcattaatttctataagatgggtgtatttgacaatatgatgcgggggtgtaaagaggccctggaggattttgtgcaatggctctggccggaacaaaagaaaaagtgagaaaagaaaacacagcgtcaggcatttttgacgctgtgttttctttttttgggagaaattttattactgcggtatatttcgggccgaaagcctcctttttcaaggaaatcactgattttaagcatggggagaaatccgattcccatacctagtaaagttataagaattaacaacacatcacgcatgacaatcccctcctttagttatagcatagcaggtataggattaaagaggcattacggatgatgcgggcatattaagaatgtgtaaagagcaaaccatcttaatgcgttcttaatgcggaagcaaaaagctttatcctattttaatcgaaaagttattagaattaactacacaagatataaagaaggtattaagaatcacgataaaattcgtatttttaatagtaaggtggaatcgttatgattcaattgctgagtaagaaatttactactacaaaattaatagttctgggatatttagtagttatattaaccggcacctttttgctgatggtccccatttccagcaaagggagcggaggggccggatttatagattctctttttacggcaacctccgccacctgcgtgaccggactggttttgcacgatacctttacatattggtccggctttggccaggcagtaattttgcttctgatacagattgggggcattggctttatgacaattgccatcacggcactgacatttacaaaaaagaaaatagggctctcccagcgtctgattatgcaggaagcagttgtggcaccacaggtgggcggtattgtccggatgacaaagtttatcctatgcggagcaatgctgttcgaaggaattggtgctatatttttggctttctggttcgtgccgcggctgggaattggaaaaggaatctatttttctgtgtttcattccatatccgcgttctgcaatgcggggatcgatcttatgggacaatttgaaaaaagttcatctctggttaccgcagggaatagtccggtggtttgcctgaccattacggcccttataatagtagggggactcggattttttgtgtggtcagatatcagacagcacgggagacatttcaaaaattataagctgcacacgaaaatggtgatttctatgactacatttttgattgtatccgggactttactgttgctgctctttgaatttcacgggcaggcaatggcaggaaagagtgtaggggagaaagtaatggcggcatttttccagtcggtaactccccggacggctgggttcaatacaattcctttagataaattgaaccaaaccagccagctgacaataattgctcttatgtttatcgggggctctccgggttctacagcgggggggattaagacgactacagcgatggtattaatgctgagcatttggacggaattattcaaaaggaaagatattgagtgcttcaagagaagaatagacggggagattctccgacatgctacctgtattatgatgctgtatgttatgctgattatgggggccacagtcgccatagcagcaatcgaccagtcacccatcgaggaaactttatttgaggtcacatcagccattggtacagtcgggctgtcccttggcattacagcagatttatcaaccatttcccatctgattcttgtactattaatgtttgtggggcgggtaggcggaatcacaatattaatctcatttggaaacagaattgcttttagaccatcgaagctgccccaggaaaaggttactgttggatagagtgggattttagctatgacaggaggtattatgaaatcagtattaattatcggattaggaaggttcggcaaatatatggccgaaaatatgatggctctggggaatgaagtactggccattgataacagggaagagagagtcaatgaagttttggagacagtcaccaacgcacagataggagatgccacaagcgaggcatttatcgcgtccctgggcgtccggaattttgatatctgtgtggttgcaatcggcgataactttcagagctcgctggagacaacatcattgctgaaagattatggggcagggtttgtcctggcaagggcgaaccgggatgtacacgcaaaatttttgctgcgaaacggagcagatcggattgtctatcctgagaaagaaatggcagagcgccttgccatgaaatatgggacaaataatatctttgattatgtagaactcacacacgactactccatttatgagatagctgtgccggaggggtgggtagggaaaagtatactggaaaagagagtcaggacaaaatatcatatcagtatactagccacaaaacaaggggaagacttaaggccgctgcccccggcggaccatatttttaacagggcagagaccctgataatagtagggcatcataaagatgtgcgggcgttaataagataagcgtttgggacaggccgatcctattttgggacgtgttctttgtagaaagaacacgtccctcttttcctcttttcataatcttaatacgcttctgtttttccctaacactatttttatctaaaagatgataaagtgtttcaagtaaataaaaaggaggagtgattttattatgaatattgtaataggaatcataggcgttatcggactcggcgtgttggtttatctgacggcggtcttgttagggggtgacaggtagtatggaggctattttgcagtatgtattataccttttgattctggttgccctggccattcctttgggaggctatatcgctaaggttatgaaaggggataaggtgttcctgtcctgtatctgcaggccgtgtgagagactgatttataaggttctgcgtgtggatgaaaaggaagagatgacctggaagaaatacgcgttgtctactgttttattcagcggcataggacttgtgatcttttttgcaattgagatgcttcagcagatattacctctaaacccggagaagcttcccggactgtcctggcatcttgcatttaacacagcagccagttttgtcacaaatacgaactggcaggcatacagcggagagtctgcgctgagctattttacgcaggctacctgcctgacagtatggaattttgtatcagcggctacaggtattgccgttttattcgtattaatcagaggatttgtgagaaagaaagcagacactcttggaagcttttgggtggatttgacaagaaccgtggtttacatattactgcctcttagtgtagtggtaacattggtgttggtttcccagggggtagtacagaatctgaaaccctatgaaaccgtttctttggtggaatcctttgagacagaggaggggacagaggtaaccgagcagacagttccaatgggaccggcagccagccagattgcaattaagcagctgggaaccaatggcggaggctttttcggggtaaattctgcgttcccgctggagaatcccacccccctttccaacttgtttgaaatgctgtcaattttactaattccagtttccctgtgctttacctttggaaaggctgtaaaagataagagacagggatatgcaatttttgttgccatggctatcatgctggtagccgcactgggaattatcggatataacgaacagcaggcaactcctcagctgtccgcgggggatcaggtaaatctgacgactgtggatcaggcagggggcaacatggagggcaaggagactagattcggcattgccacatccgcaacctgggctgcattcaccacagcggcgtcaaatggttcggtgaattccatgcatgacagttatacacctataggcggaatgataaccatgctgcagatgcagctgggggaagtgatcttcggcggagtgggctgcgggctgtatggaatgcttgcatttgccattatgacggttttcatcgccggcctgatggtggggagaacccctgaatatcttggaaaaaagattgaaccctttgaaatgaagatggctgtgcttgtgtgcctggctactccggtgggaatccttgtaggcagcggtatcgcagcagtctggccgggagtggcagacagtctgaacaacgccggggcccatgggtttgcggaaatgctatatgcgtattcctctgcagggggcaacaacggatctgcatttgcaggttttaatgccaataccccgttcctgaatgtgaccatcggactggttatgctttttgtaagatttctgccaatgcttgcaacaattgcaatcgccggcagcctggctaaaaagaaaacagtagccacaagtgccggtaccttgtccacctgcaacggcatgttcgtattcttattaatatttatagttctgctaatcggcgctttgagctttttgccggcactggcattgggacccatagcagaattttttcagatgataggataggaggagatgagaataatgtctaagaaacaacaaggacttgcagacaaagatatggttatccgtgcacttaaggattcctttgtaaagctggatccaaggacgcaggcaaagaaccctgttatgatgctggtttatatatccgcaatcatgactaccatcctgtttttcctctctctgggagggataaaggatgcgcctgcaggctttactctggggattgcggttatcctgtggtttactgtattattcgctaactttgcggaagctattgcagagggacgaggaaaggctcaggcagacgccctgcgctccgccaggaaagacgtagaagcacacaaaataccatcggcagaggaaaaggataccattgtaaaggtatcctccgccgacttaaaaaagggtgatattgtagtagtatatgccggggaacaaatacccgcagacggcgaggtaatcgacggcgccgcatctgtggacgagagtgccattaccggcgagtctgccccggtcatacgtgaaagcggcggcgacagaagtgcggtaacagggggaaccactgtgatatccgactggctggtgatccgtgtaacaagcgaacctggggaaagctttctggacaagatgattgctatggtagagggggcttcccggaaaaaaacacccaatgagattgccctccagattctgctgatcgcattctctatcattttcgtactggtaaccatgtccctgtatacatattctgtattttctgctaagcaggcagggattgcgaaccccacatctgtgacctcactggttgcgctgctggtctgcctggcaccgacaacgataggcgctcttttgtcggccataggaatcgcgggaatgagccgtctgaaccaggcaaatgtactggcaatgagcggccgtgccattgaagccgcgggtgatgttgatgtattaatgctggataagacaggtacgattacgctgggaaaccggcaggcatgcgaattcattcccgtggacggcaatacgcaggagaagcttgcggacgcggcccagctggcatcccttgcagacgagactcccgagggaagaagcgtcgttgtcctggcaaaggaagaattcaatatccggggaaggcatatgcaggatatgaatatgacttttgttccctttacagctacaactcgtatgagcggggtggattacgacggaaatgaaatacgaaaaggggcagcggatgccgtaaaacagtatgttatggaaaaaggcggtatatacagcgaagaatgcgatgaagtagttcaaagaatctcccgtcagggaggaacgccccttgtagtagctaaaaaccataagattatgggggttatctacctgaaagatattatcaaacagggtgtgaaagaaaaatttgcagaccttagaaaaatggggattaagaccattatgattaccggggataatcccatgacagccgccgccatagcggcagaggcgggagtggatgacttcctcgcagaggcaactccggaaagcaagctggcttttatcagagaatttcagagccagggacaccttgttgcaatgacaggggacggtaccaacgatgctccggctctggcacaggcagatgtggcagtagccatgaactcaggaacacaggcggcaaaagaggccggtaatatggtagatctggattcctctcccacaaagcttatcgatatagtccggataggaaaacagcttctgatgacaagaggaagccttaccactttcagtatagccaatgacctggcaaagtattttgctattatacctgcactttttatggggttatatccgggactggccgccctgaatattatgcatctggaaagtgcatccagcgccattttttcagcaatcatatacaacgccctgattatagttgcgttaattcctctggccttaaagggtgtaaaatacagggaagtcccggccggaaaattattgtccagaaacctgctggtctatgggcttgggggcatcgccgctcccttcattgccattaaattaattgatatgattatcacaggaatcggacttgtataagaaaggtgtgggaaaaatgaaaagttatggaaaagaagtgtttttaaagtctctgggtatcttgatcgcttttattattatctgcggttttatctatacctttgcgatgactgggatctcccagctgctgtttcatgacaaagcaaacggcagtattatagaagtgaacgggaagaagtatggatgtgagctgcttgcccaggaattcacagatgacggtcatatgtgggggcgtgtcatgaatcttaatacggaaacctttacggatgagaacggcaaccctgctatgtacagcggccccagcaatctaagccctgccggagaggaaatggaggcgctggttcaggagcgtgtggaaaaactgaaagaaagcaatccggatcaggcaggtaaagtgcctgtggacctggtgacagcttcaggaagcggattagaccctgaaatctcccctgctgccgcagaataccagattccaagaatcgcggaggctacaggaagatcagaagaagagatcagagctattgtggacaaatacacagaggggcgtttcctggggatctttggagaacccagagttaatgtattaaaagtaaatctggcgctggacggtattttatagcagaagtgccggtttaaaggagtggaattgtgtgattaacagaagaattgcctataagtcaaagcgaaagctggagtttgccccagactttggggagcctgtaagcatgctcacagagctgacagattccttaagtatggaatactgtagtaatcccgaaacttataaaaatgacaaagacagggtaatatggctggaatatccgtatttttgttttgactgtgatactttttttgaagaatatgggatactgctcgcctgtatagaaaaagaaatccatgtaaaagtctatgggatggcagatagattggagctgggagaactgaccgctgagtttatggatgaaaaaaacatcagatattgtaaaaagaacagttcaggctcgaattttgagagtatcagaagtctgtgcattgagatagaagcaaaaagcacagaacaatatgaggcgctctgggaattattttcccatatggactatcggtatgactatgcggctgtaaaccgcaaaaaatggaaggctatgggaggagactggacagaaaaagacccggacacgtattttgcgtatctgcagctaagggaggaacagggggaatttttccttaatatacttaccttagaacaaaaaaaagaactctggactgtgtatctggaagaagggatcagccctgtagagtttgaatatctgaacgatgccatcggaagagaatgggagattaacatctttgaatggaacctggctctgcagatggcagtgtcccaggcagggatatctgttctctatgagaaagatgatttcaggatccaggatcggcagggccggcgtatatggatggattaccggtcttccgcagcggcggaaaaattgttccttaaacttctgtttcccgccgttcctcgtacgaattagaagaaaaacgtatggaaaagtgtgacagccttttcatacgtttttctgatcttaatgcaatcttaatgctctgcagaaaaaatttattctctgaattctgggagatcaggtataatacctaatagatattaagaaaacataaggattaagtacctgatgacgaatcctgtatgggagtgtgaagaaatggaacaacggccgaatcccgatgctattctaaagcaaattgaggaagagaaggttatacaagagaaaggaaaactaaaaatattttttggctatgcggccggcgtgggaaaaacatatgccatgctggaggccgcacatgctgcacagaaggctggtatggacgtggttgtgggatatattgaaccccacacaagaccggatacgctggcactgcttgagggactttgtcagctccctcctctggagattccgtacaagggaattacactgagagaattcgacctggacagtgccatcaaacggaagcccaggctgatccttgtggatgagctggctcatactaacgcagaaaactgcaggcacagaaagagatatcaggatatccaggagcttctccgggccggaatagatgtttatactacagtaaatgtacagcatctggagagcctgaacgatatcgtggcatccataaccggtgtggtggttagggagcgaatccccgatgatgtctttgatgatgcggatcaggtcgagctggtggatgtagagccggaggatttaatcaaaaggctgaacgaagggaaaatatacaaatacaagcaggcaaagaaagccctgggaaacttttttcagcaggataatctggtggcactccgggaaattgccctgcgccgtaccgctgacagggtgaacaaaatatcggaaaaaaataagccctggatgaaaaacagtaattattatacggatgaacatatacttatctgtctgtcatcttccccttccaatgcaaaggtaatacgtacggcagcccgtatggccagcgccttccacggcatgttcaccgccgtttacgtggagacctctcagacgaagacactgagcaaatttgatcagcagaggctggcagacaatctgcgcctggccgagcagatgggagctaaaatagttaatgtattcggtgacgatatcgcccagcagatagcggggtatgccaagctggcaggagtttccaaaattgttctggggcgcagccagcagagaaggcatttgctgttctcttctcaaagctttgcggataagctgacacagctggctccgaatcttgatatatatattattccagaagcagcagaggaaaaaagaaattcttttcaaaaaataaaaggagggctgccggttcgtggattctcactgcttgattctctaaaggctcttgggatcctggtggcatgcaccgccttgggcctctggctcaggagccttggctttacagaatccaatatcataatggtgtatatcctgggagtgctggtaactgctctatgtacaaagagtaaaagctacagtcttatcagctcgatcatcagtgttcttgcgtttaacttctttttcacagttcccagattctcctttaacgcctatgaggcagggtatccggtcacttttgtcatcatgtttttggtggcatttatcacctcaacccttactatgaaggtgaagcagcaggcattcctgtcagcagccaaggcatatcgcacagagattttgcttgaaaccagccagaagctccagaaagaacgcaccattgacggaatcatcaaggaggcagccggccagatgacaaaattactggatcggcccgtggttttctatacgccggataagaaaaacaagctgatcccgcgcatattcggcacacaagagggagaggatacctccgtgtatatcaatgaagaagagcaggcagtggcagagtgggtttataaaaacaacaaacatgccggtgccactaccagcacacttccgggggcaaaatgcctttatctggctgtgcgcaataaagagcaggcgctggcggttgcaggagtcgttctgaacagcgacatgctggaatcttttgaaaaaagtcttctgatagcaatgctcagcgagtgtgcgctggctttggaaaagcaggtgctgaatgaaaaaaagaatgagattgcgctgaaagcccagcaggagcagctgagagctaacctgttaagggcaatctctcacgatctcaggacacctctaaccagtatctcaggaaatgccagtgtactgatgcagaatggggcatatatggaggagtcgcagaaaaataagatttacactgacatatttgatgattctatgtggctgataaatctggtagaaaacctgttgtctgtaacacgaatcgacaacggaaccatgaatatacagatgcaggcggaattactggaggaagtaatcacagaggctctgcatcatataaacagaaaaagtacagaccataagatccaggtagaactggaagatgagttccttatgggaaagatggattccagattaattgtgcaggtttttattaatattatagataatgccatcaagtatacgcagaaaggttcctgtatccgtatcatcggaagaaagaaaggaaactatttatatatagaaatagaggacgacggaccgggcataggcagagaagaacaggagaaattatttgatatgttttatacggcaaataatgagaggggagacagccgaaggggtctggggctggggcttgctctctgtaagtccattataactgcacacggagggaatatcggtgtgaaggaaaatatccctcacgggaccattttctatttcacgctgcctgcagaggaggtaattatacatgaataaaccattaatattagttgtagaggacgacaaagcagtccgcaacctgatttctacaacactggatacccaggaataccgctatcatgtggcgaaaaacggggctcaggccctggttgaggcggtatcccagagaccggatgtaattattctggatctgggccttcccgatatggacggagtggagatcatccgcaaggtccgttcctggtcccaggtacccattatagtagtgagtgccagaagtgaggacagggataaggttacagcgctggacgagggggctgatgatttcctcacaaaaccattcagtgtggaggaattgctggcaagagtgagagtcagcctgagaagagtacagtatcagaacagcaatgcctctgaaaacagtgctgtttttaaaaacggcggacttaccattgattacgcttcagggtgcgtaagcgtagacggtaaagaaattcatctcacgcctatcgaatacaagctgctctgccttttgtccagaaatgtaggaaaagtacttacgcacaattttatcctgaacgaggtctgggggaatgtgatgcagagtgatgtaccgtctctcagggtatttatggcaactctgagaaaaaaaatagaaaagaatacctcggaaccggagtatatccagacccatatcggaatcggttaccggatgctgcggatagaagagagtgaaaagtaacacggaaacctactttacgtaaggatgactatgtgagaaaatagaggtgataactggtaaatagtggaagataggatggaccagagatggattataaaaaggcggcaaagcagatatgccggaaactgggaggaagagataacctggataaggtggaacactgctctacccgcctcagagtaacggtaaaggatcctgaaaaagtggatctgcgaggcttaaaaaatctgaaagaggtcagcggagttgtgcacgacggggcagaactgcagattatcctggggcctgggacggttatccggatctttaactatctgtacctgatagaaaaggaagagatacaaagggcgtccggcagaagtaaatctccgggatactggctgaaaaagggagtgaaaaagatgggagatatttttattcccatcatacctgcccttgtggctgccggatttttaaagggaattgtagaccttatgggaaccctgtcgcagcatgggattctgaatatcggactggacaattccttttattcatttgcaggtctgatcgtcaattccgtatatgcatttctgcctattttaatcgccttcagtgctgccagagtttttgggggcaatccctatctgggtgccgtggtgggtatgatgatgctgaatccggatttgcagaacgcctggtccaaagtgtctgacggggttgtgacataccagagtgtattctgcggcctgtacgaagtccccatgactggatatcagggacatgtactgcctgtgattatagctgtctggattatgagtgtgctggagaaaaagcttcataagacggtacctccaatgcttgatttatttattacgcctctggcgagcctgtttatctcggggtatctgacatttgctattgtaggtcctgtatttctcaaaatcgaagatattcttcttctggtggtaaaagatattctgacggcgccctggggaatcggcggcttctttatgggtggaatctattccgcaattgtagttaccgggattcatcatatgtataccgtactggaattggggcagctggccagctatgggtttaattatcttaaccctgtagcctccgcagcaaatatagcccagggaggggcagcccttgccatggcaataagaatgaagaaccggagggtaaaagggatcgcaattccttcggccttaagtgcctttatggggattacggaaccggcaattttcggcgtaaacctccgctatggtactccttttctggcagccgcgctgggcggcgcctgcgggggctggtatgcggctctgcggggactgggggcttcgggaaccggggtttcaggcatcttcgcctttcctctctatcttaaagatccctgggattatcttctcagcctttttattgctctggcagtctcctttgctcttacgtgggttctgggaggaagggaagaaaacctacatgtcacttcgcctgtacagggagaactgatacccctggcagaggtaaacgattctaccttccgcagaggcgttctgggtcccggcgtggctatacatccttccaaaggcaagatagtagcacctgtggacggaaccatagaagtgacttttgagaccgggcatgcagtgatactttcgggaagaaacggtgcggaaatattggtgcatgttggaattaacaccattaatcttgggggcaggtatttcagctgcaaggtgaagaagggagagaaagtaaagaggggggagcttttgattgaatttcagaaagaatctattgaaagagagggatatgacctgactactcctgtgattttggtaaatgcagataaatacgatctgacacttataagagaacctggaaaggtcaaaatgttagatgaagttatgcagatagaataaaaggaaagtgttgtaagaaaggataagaacgtgtataataacactattattacctcatcaaatgcgccggaatattacgaatgtgagatattggtaaaaaattcacaaagtttgctctaaactattgacaaaactataagaatgtgatatttttaacatatcatcaaagagggttctgatttctgacgggtttaatgtggagcaccacagtgagattaggacttatagtaagccgaccgtctgggcagcatttgcagcgagcagatgttgccctttcttgcttttttgggggaaagggcagaaacgatgagagtaattttaatttacataacttaaaggaggattttactatgggattcaaatcagacatcgaaattgcacaggaaacgaccatgcagccgattttagaggttgccaagaccgctggtattgaccagaaatatctggaacagtacggaaactacaaagctaaaatcgactacaacatgcttcgtgacacagacaaaaaagatggaaagttaattctggtaacagcaatttctccaacaccggccggtgaaggcaagacaacgactaccgtaggtctggcagacggtatgcgcaagattggcaaaaacgttatggttgcgctccgtgagccttctctgggacctgtattcggcgtaaagggaggagctgccggcggcggatatgcccaggtagtgccaatggaagacatcaacctgcattttacaggcgacatgcatgccatcggcgcagccaacaatcttctggccgctatgctggataaccatattttccagggaaatgaactgggaattgacccgagaagagtaacctggagacgttgtgtagatatgaatgaccgtcagcttcgcttcgtgacagacggcctgggcggaagaaccaacggcatgccccgtgaagacggctacgacatcaccgttgcttccgagattatggcagtattgtgcctgtcctcaggaatcaatgacctgaaggcacgtctggcgagaatcgttgtgggatatacctttgaccagaagccggtaacggcgggagatttaaaggcagaaggagctatgtgcgcactgctgaaggatgccttaaagccgaatctggtacagacgctggagcatacaccagccatagtacacggcggaccgtttgccaacattgctcacggctgtaactctgtaatggcaaccaagatggccctgaaattaggggactacgtagtaacggaagccggcttcggtgcggaccttggagcagagaagttcctggatattaagtgccgtatggcagggctgaaaccggacgcagtggttgtggtagcaactgtgagagcgctgaagcatcacggaggagtggcaaaggcagacctgaacaatgagaatctggatgcactggagaaaggacttccgaatctgctgcagcacgtaggaaatatcagaaatgtatataaactgccgtgtgtggttgcgataaacgcattccccacagataccaaggccgaattggatctggtagaggcaaaatgtaaagaattaggcgtaaacgtagcactgtccgaagtatgggcaaagggcggcgaaggaggaatggcgctggcagaagaggtagtgaagctggtggaagaacccaacgactttaccttctcctacacggacgacatgaccatcgaagagaaattaaatgcaatcgtaaccaagatatatcacggagacggcgtagtactaactccgaatgcgaagaaacaggcaaaacagctgacggagctgggattcggcaaatgcccgatctgtgtggcaaagacccagtacagcttctcagacaatgagaaattgctgggagcgcccaagggattcgaagtaaccatccgtaacctgaagatttctgcaggcgcaggattcatcgtagcattatccggggacatcatgaccatgccaggacttccgaaagtaccggcggcagagaagattgatgtagatgagactggtaagatttccggattgttctaaataaagaatttgatctgggacggaggaaagaattctttcctccgtctcttatctccagaggaggatgaatatgtttaaagatgaatttgcggcagtttgcaatgccggtaagaataagttaggattgttagaaaagaatccgctgggatactttgtttcctctatggtagcgggtatgtttattgcttttggaagttttgtcacatttacactgggagctggcctggccgctgctgagtcaccgtatgtaaagatgatccagtcaattgcttttgcggcagccctcagtctggtagtggcggcaggtgcggagctgtttacaggcaataactttgtgatgagttccgcttcctttaacaagatgatttcctggggaaagacagtaaagctgtgggttgtctgttatatcggaaacctggtaggttcctggctttctgtcctggtttttcagctgacaggagttcccaatggggctgtgggtgaatacttcgcaggggtagctgccacaaagatggcacttacgccaatgcagatgctgactagagggatcctttgtaatattttggtgtgtctggcagtatggtgcagtattaagatgaagtctgagtctggaaagcttatcatggtattctggtgtatctttgttttcatggtgacgagctgtgagcatagtgtagccaatatgagtattatgggagtaggccttctgaatcctggaactgcttctgtaagtgtgggagcgtattgcctgaatttactgctggttacgataggaaatattataggcggcgccatatttgtagctttgccgtactacataatcgcaaaagaaaaataagagactttggaagaggaagaatatgcggtctgttgcaccgatattcttcctcttttttgtgcaggggcaaaactgggcggcaaagcatcaaataatcacctttcactcttcatacaatgatataggactatgaggaggatactatgaacaatcaaaaacttgaaaacagtctaaatttagccctggacgcaaccccggaggagagagaaaaagctccgaatctggaaatcgggtataacccattggaaagcacttgggagttaattgtaaagtatacgggagacatcagcagaatagccggggagaatgtacaggtagttcctcttctggggggatatgccattcttacactgcctgaggcatacatccagcgtctggccgagctgccggagattacttttatcggaaaaccaaaacgtttattctttgcagttaatcagggaagagcggcttcctgcatcaatcccctgcagacctccaattccccgctggggcctgctcttatgggaagaggcgttatcgtggcctgtgtggattcgggaattgactacgcccatcctgatttttgcagagcggatggaaccacaaggatactgagcctctgggatcaaagtgttcccggaaaccctccggagggatatttcataggaacagagtacacgcaggagcagatcaacgaagctctccgccaggaaactccagccgcccgatatgagattgttcccagccgggatctcagcggccatggcacgggggttatgggaattgctgcgggaaatggccgtgcatcccagggggcttaccggggagtggctccggagagtgatcttattgtagtaaaattaggaccttccaggccggaaggatttcccagaaccactgagctgatgcaggggattgattatgttatcaggcagggagccgcccttggtcgtcctgtggccctcaatcttagctttgggaataattacggcagccacagcggggattctcttctcagtacctatattgacagtgcggcgggaatgggaaaaaatgtaatctgtgtgggcactggaaatgagggaaaccgtgcgctgcatacgtcaggagttctggaagaaggagttgtccagaatgtacagctggccgtaagcacttatgagactggcatgaacattcagatttggaagtcttatgtagaccaggtggagattgcactggtacatccaaacggcaggattgtaggtccttttcaggagattctgggaccccagcgctttaccataggaagcacggagatattgctgtattatggggaaccgggtccctacagcctctctcaggagatatacattgaactgatccccagggaatcttatcttgacagcggagtctgggagttcaggcttcagccgtcgagaatcattgagggggagtatcatatgtggcttcccggaggaaatgtcctgaatgaagggaccagattctacctgccttcgccctataccactctgacaatcccgtccacggcaggaaaggtcatatcagtaggggcctatgattccagatatcagtcttatgccgatttttccggcagaggatataccaggatggtgggggcagtaaagccggacttggcggctcccggagtagacatacagaccactgcggtagggggcggttatgattccaggacagggacctcttttgccacgccctttgtcacaggctctgcggctttaatgatggaatggggaattttgaatcaaaatgatccctttctgtacggtgaaaaggtgaaagcatatctcaggagaggggcgaaacatttactgggacagcagacctggccaaatccaaggctggggtttggcgtgttatgcctgcaggacagctttcctgtgtagaacttcttgtaagaaacccgcctttttgctagaataaagtcagcggccaaagaatctgaccgtaagctgcgggaagaagaaggagatactatgagtaaaatattgaagaaactgacggcttattacaagccatacaaggggctgtttttttcggatttgttttttgctattatcggggcggcgattacccttgtaataccgcttctggtaaggtatattaccaatcaagtgatttatatggatgcccgggcggctttccggatgattattcaactgggaatctttatgatacttctggttttggtggaagccttctgtaatttttatatcgcttactacggccacattatgggggccaaaatagagcgggatatgagaaatgagatcttcggccattaccagaagctgtcatttgccttctatgacaaccagaaggtgggccatctgctctccaggattaccagcgatttatttgatatcagtgaacttctgcatcacgggcccgaggatctggtaatctcggtgattaagtttttaggggcctttgttattctgttgtttatcaatcccaaactggcaggggtagcatttttctttgttccattcctggtaatttatgctgtttactttaataaaaaaatgaagaatgcgttcagagaaaaccgggccagaatagcggatatcaatacacagattgaagacagcctgtctggaatcagggtcgtcaagtcttttgggaatgaaagtgtggaaatgaaaaagttttcccggggaaatgagcggttcgttgactctaagaagaaaagctaccagtatatgggggcttataattccggcatgggggcatttacaacgctgatcaccattggggttttgattgcaggcgcggtgtttatcacaaaaggacagctggcggtggcggatttggttacctttctgttgtacataaataatttcacggatccggtaaaaaaactgattacatttactgagcagttccagaacggatacagcggctattcccggttcctggagattatggccattgcgccggacattaaagatgcccctgatgcggctgagctcgcgaaggtaagaggcgatattgattttgttaacgtaaccttccgttatgaagaaaatcaggaggatgtcctccggcatgtcaatcttaaggttaaggcaggggagtatgtggcgctggtgggaagctctggtgcgggaaaaacaactctatgcagcctgattcccaggttttatgatgtatcggaggggtccgtgacccttgatggtatagatatcaggaagatccggctgaaggatctcagaaatcagatcggcattgtccagcaggatgtctacctgtttgcaggtaccattatggaaaatatccgctatgggaaaccggacgcaacagatgaggaggtcattcgggcggcaagagctgccaatgcccatgagtttatcatgaatatggaggaaaattataatacggatataggccagcggggagtcaagctttccgggggacaaaagcagaggatttctattgcaagagtgtttctaaagaaccctcccattttgatctttgacgaggctacttcagccttagacaatgagagtgaaaagattgtacaggaatccctggagtcattggcaaaagacagaaccacctttgtaattgcacaccggctgtctaccattcgaagggcagagagaattctggttctcacggacgacggaattgccgaggaaggaacccatgagcagctgataaaacaaggggggctttatgccagtttgtatgagatgtcatttagttaggtgttaatccttaaataatgagtgacagatgcaacaataaagagagaacagaacactctttgactagaggatagaattggatggttctatacgggaaagggagtggggcgtatggtgaagaaagttagatggatttctgtctattcggctgcacattttgcagtggactttgcctgcgccttttttatgttttccaggtttcaccaggagggcaaatgggattagttcagaactttccatggaaagaggaaggctactgggggattcgatagcagaacccgactattcattctacggaaaacacagaagtcagataaaatcaataaaccgtatgtttgaagcaaacggcagcggaggaacagcagatatatatgaagaaccggaggcggaagaaccggtaataaagatggaaaacggctctgtcttttgtgtgattcatatgtatacagataaaaagggggacaagtggggcagcctgctgtacgatgtacagggcaacgatactgccaagacgcaattttatgcaggagatcatttaggctgggtgaagatggaagatcttttagtaagatatgatgaaatgtcatttcgggaggagtacgggaaacaattccagaaatatgaaggcgagctcgacggatatcaggcggctcaccagatgttatacttctggcagtatccgggctcagaatataagcaggagtggtgggtgcaggaggaggcaggggactggaacattcaggagacttacagagatgatgcaggcagcctgtggggatattcggattatctgccgggggttaagggatggatctgtattacggatcctgtgaatccggatttgcctgtgttagagagagaatccattccaacttcagaggttgaagaatatgctccgggcaaatcccaaaggggatatgaatttataatcggaggcatgattttgcttgtgtctctactgaccgcaggaatgatttttgtattttggaggcggaaaaagcagtcctgaacgagattttaacaggggattcttgtgtttttaccagattgttagtataatgaacattatcgcattgatactttaaagaagggaagtaggaaagatgatagcagataaaatggtgaattttgtaaaaaacagttcggccatccgcgccatgtttgaagaaggaaaaattatggcagaaaaatacggggctgagaatgtatatgatttcagtctggggaatccaaatgtgccggcgccggcagaggtaaaagaagctataattgacattttagatcatgaagatccggtagtggtacacgggtatatgaataattccgggtatgaggatgtgagggctgccattgcaggttctctgaacggtaagttcgggacggctttccgggaggagaatattctcatgacggtgggagctgccgggggaatgaatgtgatctttaaaactcttttaaatccaggtgatgaggtaatggtattcgctccttattttggggagtacagaagctatgcggcaaactatgacggagtgctggtagaagtgtcccctgacacagagacattccagccgaacctggaggaattccgtgagaagattacccagcgcacaaaggccgtaattgtaaattcacctaataaccccacgggagtggtatattccgaagagaccattcacaagcttgcgggtatcctgagagagaagcagaaagaattcggcacagagatttatcttatttcggacgagccctatcgtgaactggcttatgatggggtacaggtgccgtatctgaccaaatactatgagaacacaattgtagggtattcttacagcaaatccctgtcactcccgggagagcgcatcggatacctggtgatacctgatgaagttgctgacagccaggatgtgattgccgcggctaatgttgccaaccgaatcctgggttatgtaaatgccccatctctcatgcagaaggtagtggcaagatgcctggatgctgaggtagacgttccggcctataacaaaaaccgggaggccctgtacggaggactgaaaaagctgggattccagtgcatcaaaccagagggagcgttttacctgtttgtcaaatctcctgttgcggatgaaaaagtgttctgtgacgctgcgaaaaaacatcacatcttaattgtaccggggtcatctttcgcatgcccgggctatgtgcgcattgcatactgtgtttcttatgaaaccattatgaattctatgccgggttttgaagctttggcaaaagaatttttgtaatacttggaggatattatgaaaaaatgggaagataatatacgtaaagtagttccctatgtgccgggagagcagcccaatgaaccagaaatgatcaaactgaataccaatgaaaatccctatccccctgcaccaggcgtgcagagggcgctggaggctatggatgccggctgtctccgtctctatcctgatcccggagcacatgagctcagggaagaacttgcccggtattatgggcttttggaggaccaggtttttgtgggagtggggtcggacgacgtgctggccatgtgctttttgacgttttttaattcctccgcacccattctgtttccggatatcacgtattctttttatgacgtgtgggcagatctgttccggatcccctatcagcgtcccatgctggatgagaggtttcatatccggaaggaagattatttcagggagaatggaggaatcatctttccgaatcctaatgcgcctaccggcgtggaaatgcccctggaagaggtcgaggagatcgtccggaggaatccggatgtgattgtgattgtagatgaggcatatatagactttggggcagcctccgcgcttcctctgattgcaaaatatgagaatttgattgtcgtacagacattttccaaatccagatctatggctggcatgcgtatcggctacgctatgggaaaccccgtacttatcaagtatctgaatgatgtgaaatattcatttaattcctacaccatgaatcagacagcgcttcgcctgggaacggaggcagtaaaggatgagagatatttcagagataccctgggcaggattatagagacaagagagtggacgaaagaggaattgagaaggctgggctttcggttcgaggattctaaggccaattttatctttgctgcacatgaaagctgtccggctgaagagctgtttgaggcattgcgcgcggatcatatttatgtcagatattttgcggcgcccaggattaacaatcatctcaggatatctattggcacacagcaggaaatggagacacttatccgtttccttcaaaaatacttaaagaaatacgaggagaaataacgtggattcagcagtacaatggtttgcaaataatatgccgtcatttttatcccctgaggcggcgatttttctggtatctatggttcccattctggaactcaggggaggcctgttactggcttcgattctgaaaatccccatggtgcaggcgtcgattatatgcatcatcggaaatattttgccgattccctttatcctgttgtttatcaggcagatttttaaatggctgaaaaagacaaagctcttccggcccctgatagagaagctggaaaagagggctatgggaaagagtgacaaaattaaaagatttgaattctgggggctggtgttctttgtgggagtaccgctgcccggaaccggaggatggaccggagcgctgattgcttccctgctggaagtggacttgaaaaaatcagttcccgctatcttgttgggaatttgtatggcgacagtaattatgctgatcgtttcttacgggatgttgggaacaattatgcaatagtgatttcataaggaatttataaaaagcagcagacatatattatgaataacgtaataccgtggagtatagtatgaaggtgagtatcagccgcgttatcattggaatagagtgtctgctgcttttttgtacctatttatggtactgccagccgaaagggatcactgtggccagcgattccgccaaaccggaagaaaagtatattaaatgggtggactttaccgtgccatatgaggccctgcagcaggcttatgagttggatgtaagtacctatgaacaggaggtacacttgaactggattgaactgctggcctgcctgggtgccagatacggaggggatttcggcagttactcttccaaggatatgaaagaactgggcgggaagctgacctctggggagacaacaatgggggagctgacaaaggacatgaaatactatgcttattacctggaagcatatacggctgttttgggcgggatggtaggagaatacgagatacaggtgccaaaagaagacgcacaggagactgatacgggggcacaggagacaggagaaaaggtttgggcaaagcaatacggcctgaaagcctattctcccattgccaggggatatgaatatcaggactatgatgattttggggtatccagaagctatggataccggaggcagcacctcggacatgatatgatggggcaggtgggcacaccaattgtggcagtggagtccggatatgtggaggccatcggctggaatcagtacggaggatggcggctgggcatccgcagttttgataagaagcgatattattattacgcgcatctgcgccagaattttccttttaacaaatctctgaaggagggcagcattgtccaggccggggatgtgatcggatatctggggcataccggctacagtgccaaggaaaatgtgaacaatatcgacactcctcatttgcactggggtcttcagcttatctttgatgagagtcagaaagaaggcaatcatgagatatgggtggactgctaccaattgacaagatttttatcccagaagagaagcagaaccgttaagaatctggagacgaaagaatatcaccgtgtatttgagatgagagatcccaccgcggaggagtataaaaagagaataggcggataggtgaaacagcggcccaggcgtaaacgtaacgctttggccgctgtatttgcgctgtgagggagagattatgtatctgaaatctgctttcccgcccgatccatatgataattatctttataaatcagttgggagataggcacaaactcatagcccttcccctgcagggtagtaataaccgtttccagggcatctttggtatatttagcgccgttgtgacagaggatgacagaaccattttccagtgatttattctcacagattgtctggataatggaatcagcaccatagtctttccagtccagactgtccacggaccactggatcggataatagtgattggcggcggcagttttgatcacactgtcattatagtcaccatagggaggccgaaagagaatcatatccacacctgtgagttcttttaccttgtcgtgcaccttcaaaagttcctgtgtctgctcttcggtgctgagctcgctcatatgtttgtggttttcgctgtggtttcccaggtcatggccggcctcatatatcttttttacatcctccggataactctcaacccatccgccggtcataaaaaaggtggctttgacgttatgtttagccaggatatcaagaattgtctgggtatcttcattgccccaggcagcatcaaaggagatggaaatctgcggtttatcggtatctacacagtagattggcagctcacggcctccgacgcttgtgctcacggaggcaatcttgggaaggtaggtaacggcgcagatcagaagggcaatagcagccagtccgacgaaaattgagactgcgtttcttttgaatcgttgagtggaagaagaatcaggattttcttgattcataatggatacctctgaaaaaggatcttgttactatcttatgggatacagcttatacattatgcactgcaaaaaaatagaccaaagcagtagaaaatgtaatattatggaggtataataaaggaatatatactcatataccgtttgcgggaggaaaaaacaaatgaataatcagacagacgtcagggaaacaatctatcggttttgccgtgcctggtttgaagagcgtaatcttacggaaaccctcacatttctcacagaggatgtggactttgtgggaactggaaaaaacgagtctgcctggggaaaagctgagatggaagcatatctcagtcaggatatcagagagatatcagaaccatttaaggttgggatctcattcatatacgaacattttattaccgagcaggtgtgcagcttatctgctgaggtgacattaaagaataccttatatacctggaatctgaaagcattcttcacgctgctttcagaggagtcccgctgggtgatcaaaagttttcatgtggcagagccgggaaccagccagagggaggccgagcactatccgcaggcccttgtgatggagcattctatccgtcagcggcaggagctgttaaatgactcactgcccggaggcatgatgggcgggtatattgaggagggatttcccttttattttgtgaaccgcaggatgctggaccatctggggtatgcggacgaggcggaatttgtatcagatattgacggaaagattgggaattgtatgcaccctcaggatcggcagatggttgacgatgcggtagaggcccagctgagggggggagatgaatatgttgtggaataccggatgaagaagagagacggctcctacatctgggtgcatgatctgggacggcaggtgactgcggaggatggcaggcctgctataatctctgtgtgtatggacataaccgcccggagacaggcacaggaggaggtattccatctttataacaatattccgggggcagtattccgctgcagatttgacaaggatttttcagtgattgcggctaatgacggcctgtttgaatttctggggtataccagggaggaatttgccgccctggggaataagatgtctgccgtgatttatccggaggatctcctcattatgaaggatatactggacagccagctgcggtatggcaataccatacaaaatcaaaaccggctgatatgcagggatgggaccgtaaaatggatctccataaaggctcagcttataagaggcgaggatcaggaacagtatttctactgtgtctttgtggatattacagatgaaaagaagctccaggagcaggccagggaattatatgagaaggaactggcgtattttgcagagctgtgctccagggacgggaatatccagggaagcttaaatgttaccagagggatcgtggaaacctacctctcaaattctgagatggctgtggcttatgtgggggaaccctatgagaaggtaatagagaccctggcaatgtctgccatagatcctgcgtatggagaagagattagagttacactggacagggagaaggtcctaaaggattttgactctggaaagatagactatcatctggatttcctgcgcaaaagcaacagaggggactgcttctgggaaaacacatatatgcgttccttccggaatcctgaaacaagagacattatcctgttcttctacacatcagatgtcacggaacagcggctgcaggaacagctgcttcggagaattacggagctggactatgacatcatcgtagaggctgatactgtaagagatacataccggatgatcagcagtgcaaaggaagagtttataatggctccagccggtaagctccgggaagaactttgttctgtcgcagagcggctgatggacgaggcgtctggaagagagcttcttagcaaactggattacggttacatgaaaaaggagctctccaaacaagattcatactccttcatcatagaaacaagggagaggaatgaagaaattcgtgtgatgcgcctcaaagttttttatataattaaagagcttgggcgcgtatgtattgcctgtacggacgtcacggatattgtgtcccaggagcagagacagaaggaagaacttgcggctgccctggtggctgcggagcaggcgaatgccgccaaatcagattttctttcccgtatgagccatgaaattcgcacgcctatgaatgcgattatcggtatgagtaccatagcggccaaatccattggggacgatgaacaggtggaagactgcatctccaaaattggtatttcctcgcgttttttgctgtcactgatcaatgatattctggatatgagcaggatagagagcggaaagatgcttctgaagaacgaaaagatacctatggaggaattcattcacgggattacgtcaatctgctgtgcccaggcagatgctaaaggtgtggaatatgagtgcattgtagatccggtattggacgactattacatcggggatgccatgaagcttcagcaggtattgattaatatattaagcaatgccatacggtttaccggtgagggcggcaaggtgacattttcagccgcacagcgcagaaagacaaaaaatgatgcggtcctccggttcattgtaaatgataccggcataggaatgggcagcgagttcctgccccatatatttgaacctttctcacaggaatctacaggaacaacctccctgtacggcggaacaggacttggacttgctatctctaaaaacattgtggatttgatggacggaaaaattacagtgcgatccattaaggggcttggttcagaatttactgtggatgtaaagctgggaattacagaggaagagaagctgcggcataaccaaaagaagcagagctataatttttcccatttaaagactctggtggtggatgacgatgtggctgtctgtgaaagcgcggtagtaactctccgggaaataggtgtacgggcggagtgggtggacagcggcaggaaggcggttgaccgtgtcagaaatttttgggaagagggccgtttctatgatatgattctcattgactggaaaatgcctgagatggacggaatagaaactgccagacagatccggagaattgtagggcctgaggttacaataatcattatgacagcctatgactggatatccattgagcatgaggcaaagcttgcgggagtgaatctgcttatgagcaagcccatgttcaaatcctctctggtttcagcttttagtacggccctgggggagaaagaagagcaggaacagcaggaggatgcggatgacttcgattttacaggcaagcggatactgctggcagaggacaaccagataaatacagaggtagctgtcatgctgctggagagcaagggattccaggtggatacggcggaaaacggccttcgggctttggagatgttcagcaaatctgagacaggatactatgatgctattttgatggacattcgtatgccgcttatggacgggctcacctcatctgcaaatatccggcatctcagcaatgcggacgctgaaaccatacctattcttgctatgactgccaatgctttcgatgaagatatagaaaagagcaaggcggccggaatgaatgcacatttggctaagcccatcgaaccgaaccgcttgtatcagacgctatatgactttatttacgggaaagagaattcatgacctgagagaagggaactgttggctaatatgaaaggtatatacaaaaggggactggcggtcctgtttctggcctgtcttctgctggggacaatgatggtgcaggctgtcattcaggcgcagtcttacgggcggttgattaattatgtgggaattgtccggggggctacgcagcgcctggttaagcttgaactgcagaggaaggaaagtaatgagattatacagtatatagatggtattatagaagaactggcaggagcggaaggaccctataatcttccggctccacaagatgaacagtatcaggaggatcttcaggagatggagcgcatgtggagccaggtgcaggatcacatatacgcataccgcttgggagaagaatcggacgcagaggtgcttgcgctgagtgaggcattttttgagcaggctaacgacacagtattttctgcagaagaatattctgtcagaaaaaatcggacgctgctgggtgtatgtgtcgctctgctgggggtggtagctgttatctggctgctcatattctggtcggcttccaggaaaattctttttttggagaacacgaataaagaactgaatgaactggcgcggaaggatccaatgacaggcgcttaccagatagaggcgttcaaggaagaggcacagaaacttctggatgccgctacgggtaaaaaatatgctttgttgtatacagattttacagatttcaaatatatgaatgatgtgtttggctatacgtatggagacagtatcctaaagcaatacggtgaaattttaggtgagagcctcagggagggggaaatttacgggagggtctctgcagaccattttgtgatattaatgcattatgaggaaaagggagaggcagcggcccgtcagagaaaagcggatcagaggattatcaagtttatgcataattcctatgataagcagagtgttcccacctgctgcggcatctgttgtgcggaggacgcaatggaaaccatgctaattgataatctgattgacaaggcaaattttgcgagaaagaccgtaaaaaatgggacaaaccccaattatgtgtattacaacgagagtatacggatccggctccgggaagaaaaaaatgtagaaacacgtatgcagtcagctttggagaatcatgagtttacagtgtattaccagcctaaggttgaactcaaaacagggaggattgcctgcgcggaggccctggtcagatggaaagcaagtgacggtgctgttatatctcctgattattttatccctgtatttgagcggaagtttttaattgggcagttggatcagtatgtctttgaagaagtgtgccggtggctgagatctctcctggatcaggggcgggaagcactgcctgtatcagtaaacgtctccaggctgcagttttatgatcaggattttgtgggcaggtatgtggaaatccgagacaagtatcagattcctccccgtctgctggagatagagttcacagagtctatggtatttgacaaggaggaactgctgattcagattgtaaaacagctgaagaaggaaggattctcctgttccatagacgatttcggaaaggggtattcttctctcagcctgcttaagagtattcccattgatgtattgaagatcgatcgattgttttttgtagagagtgaggataaggaaaaggatgctgctgtcatcgaggggattatagacctggtgaagcggtttcatatccaaacagtagctgaggggattgagacttgggaacaggtggagtatctgaagcatatcggatgtgactttgtgcagggctatgtatatcaccgtcctatgccggaagcagaatatgaaagacttttggagcaacagcagtaatcgcataggtaacggtctgactgagaggaggatgtaaatgctgaaaaaaattacggtaaaaaatatactgctgcttgctctaagctgtattatctgcagtatagcagtaaactgggtagcgctccccaatgggtttgtagtgacaggcatcactggacttgctatgacagtctctgagtttacggggattcattatgcgctgattaactatgtgatggtaggcgtggtactgatcgttacatgggtgaaaatggataaggaagaagtatccagtattctttttctgtcggtcctctacccggcggtcctgtgggtgatgagctatttttccgtacctgtaatatttgaggataaactgattgcggttgctttttttggcgtcctgctgggtattgggacaggaattgcctttcgcctgggattttccttcggaggaacagataccattgggaagattctaaagcacactgctctaaaacagatccccctgaaaaccatattgctgttggtagacgggacgattctgctgattatgcttactgccttcagccttgacgcagtggcatacgcatttgtgggccagctgatctatgtgaacagtatgaattttgtgctttttaatatgggtcccaagctgtatgagattcagctgatctgcaacgctcctcacagtattgagcagttcatcatagaggatattcggaaaagtgttaccattcaccaggtggtaggaggatatacaaaagagacgaagacgcagattgactgtgtctgtacctcaaaggaatacgtgaagctgagggaatttgtaaagaaggaagagattgactgctttatgaaagtcttccctttgatgcatgtgttcggacaggacaaagactttttgaaaatcaagcaggagatcatagagtaaaaaactgctctgtacataaattggaggaactcaggcgaggagaagaaacttggaccatctgccgcctgaattccccgggttttagtgaaaatgtacataaatttcggggagaaaattgttaaatatgcagaatatacaaaaaggagtttacaaagtaaggatttgatgctagacttatatcaacggataaatttaaccgatttatttttttatctaactatatgtaggatgttggatgtagaataaagaatgaagtatataagagaatgtcattaaagtattagtttaattatagagtttccatgtcgtaaaggtaactctgcctcacaatccggtctatatcatacgcggtttcttctgcaatcagatagttgaggagttcccagtgagctgccttgaaattttcctgttttccttcttttataatcctggttaccgtatccaggcgcagcttttctgtaagttttcgcacggttgtattcatactgtctatgagtgggctctgacagacagaagagatggattcgtgaaagagattgtctgcctggaataccgcctgtacactgtgaggcttttcttcaaaggattctgccagacagtgatactgacggatcaattcctctctgctgttcggggtaagcttttgctttgccagtttcatcaggccaatttctatcaattctctcagttccatcagcgcaagctgagaagagctgctgctgctcaagatcaccccgtagagcaagggattcagcataattcctgaaaagccttgtttaacaaaggttccctctgctcttcgtatctcaagcacgccgtaggaaataagcatttttatggcctcacgtatggaattacgccctacgccgagaagttccatcagctcggtttctgtgggaatcttatccccgggtttcaactggccatggataattgcgtttgtcagcgcatctataatctgctctactatagaactgcttttaatcttgctgaaggtgagagcctgcataagcagttagtccatgtgagagccgccgttaatgtcaatttcttcaccagtgatataagatgcttccctggacgcaaggaatacaatggcattagcgacttcctgggtttcccccggacgtcccatagggattccgtcgatgactttatcggcatcctccttgggtagggatttccagatttcagtattaatcaggccggggcatacacaattggtggttatgccatactgagaaaattctcttgccaggtttttagagaatcccagcacagcagctttagaggccgaatagtgagctcccccgaagataccgccgcctctttttccggatacggaagaaagtgatacaatccttccgtatccggcttttttcatgggctccagtacagcctgtgtacagaggaagaggccaaacatgtttacattaaagattcttttaatatcatccagcgtcatatcttctactgtaactttttgggagacgcctgcattattgatgagaacatctattctgccgtatttatccacaatagttgaaaccatattgtcaacagactctttttctgtgatatttacggggatgccgaaagctttgccgcccagagatgtaatataatctactgtttcctgaatccctgcttcattaatatcagcgataacaacagtggccccctgtccggcaaaggtggcagcgatggttctgccgataccttttggtgatccgcttccagttacaataacaacttgcccttcaaattctaacatgatttttcctcctttttatttgagcattgattttgcggtgtctacaatacgctccgtggtgatgccgtttaattccaggagacgctcataaggcgctgactgaccgaactgatcctgaattccgattcgcttcacatgtcctattccttcttccgcagcgacctcacagacggcgcttcccagaccatttaagatattatggtcctccacggtaatgattctgccgattttgcggagacaatcaagcacagcttcgttgtctaaaggtttaatggtatgcatatccaaaacctttgtacggatcccacaagaaatcagcttttcctctgcctccagagccaggcggacggtgtcaccgttggcaattatggcgatatcttctccttctctgagagttactgccctgccaatttcaaactcctgattctcatcgtagataacagggatggcatctctggtaaaacgcaggtaaaccgggccggaaatttcggcagcctttgccaccagctttttagcggcataatagtccgcaggcattactacggtcatattgggaattgtcctcaggacgcccatatcttcaatgctttgatggctggctccgtcattggccggtgtcactcctccgtgggagcaggcaatttttacatttagtttaggatagcagatttcctggcgtatctgttcgcacatgcgaagagatccaaaaacggcataagtcactacgaaggggatttttcctgcagtcgcaagacctgcgctgacacccgcgccattctgttctgcgatgcctacattcagatactgctccggcagctctttggcaaaggccccggtcttgcaggactttccaatatctatgtccaccacgcagatatccttattatttcttccaagttctacaatggcttccccaaagccatctcttgtagcaatcttcgttccttccatcagatatcccccctttcaagctcttccattgcctgtgcgtactgctgttcattcggcgccgcaccatgccaccccagctgattctccataaaagatacgcccttgccctttaccgtatgtgcattaatgaatttgggcttattcgttttgcctgcccgtatttcgtccagtgtgcagaggatctcatccatgtcatgaccgttaatttcataaacttcatagccgaaatcttttaatttttggctcatatccagaagaggcatgatttcgtccgtggtgccgtccagctgaagtccgttattatcaagaataacaataaggttattcaactgatatctgttcgcacacatgacggcttcccagatctgcccttcatcggactctccgtcacctatcattgcaaatacccggtagtctttgtgattcatttttccggcaatggccatgcccactgcacaggacagcccctgtcctagagacccggtggaaatatcgatgccggggcatctcttcatatcgggatgtccctgaaggatggatccttctttgcgcagcgtatgcagttctttctcagggaagaacccaagagtcccaagagccgcatattgtatggggcatacatggcctttggagaggacaaaacggtctctgtcttcccacttaggattgttaggatccagattcatctcccggaagtagagcgcggtcacaagatccgcggctgaaaaggcacctcccggatggccggattgggcttcatatatcatagtaagggctgttttccgcagctcttttgcctgttgttttagttcctcagtaccaatatttttcatagtagcctcctaatcatcatctgtagaacgtaggatatatttgggcagagtattgctactctgtgatgagtgcaatagctctggcgggagcgcctccgcagccctccattttcagcggcagcagtacaaaatcccagcggggatattccagcagttcctctggaaggaaaagttcctcgcccagccatatttcatttcctaagagcagttcatgctgcatcaggccctcccctgcttttgggccgccgatactcatagagtcaattgcaataccttttacttttttatcaaagagccactgcgctccatcctcgcccagatatggccagaagtcgcagtactctgagctccagtctcttttatagccccatcctgtgcacaaaagaacaatatccccctctttgataatatctttgtaaggttttaggtgttcagcaccgatagcagtatgagcatcaattccaaacaaatcgacgactacagcttcccctatgtattgttcaacaggcgtctgtgccactgtttttccctggggaaagtggtggaagggcgcgtctacatgcgttgaggtatgtgtattcatgtaaatgcgctcggatgtgtagccatctttgggcttcagtgtctcataattaatagaagtcagctcatagggcatatagccgggattgttgtgataaaaagtctgggacaagtctaatagttttttgattttcataaaaaacctccatttctgaaattattttctggtttttctggtggtaatgctgccgattaaaactgcaacgataatgactacaccagtaactgttccgctccaaaatgtattaatccccataaggttaataccattgttaataccagtgctgatcaaggcaccaattaatacaccaaaggcagagcccaatcccccggacaggctggcacctccgattactgtagcggcgatggcgttcagttccatgcctgttcctgcagtacattccactgtgagaagataggacgcatttaaaagtgctgcgagtccgcagaggatgccacatacggagtagcagataacttttaccgccactacagggatacctaccaggcgtgcggcctcctcattgctgccagttgcataaatccagcgccccagcatagtcttccgcaggacaaactgcagaagaataacagcaatcagcatataggtaatataattgggcagtccgaacagaaagcttcctctgtcaaaagccgcaaaggatgtgtggttgctgatcgtctgggaattgccccctgctactataaaggtaaggctggaagcagccccctgcatagccagtgtaacaataaatggggccatctttacctttgccacaaagaatccgttaaataagccgcagagcaggcctactcccaaccctgcaattattcctgctgcaattccaaatttaatcatgcagagggtggcaaccattccggcaaaggaaaagatagacccaacggataagtcgattcctcctgtaatgacaaccagcaattggccaagagatataataaataagggtgcgcaagcctgaagcacatttttcaggttacgggcggtcagggctgtaccagtagcaaaatgcagaataataaatagtataattaacaccaaaaacataccaatttcaagcttatatgcttttgccgtctgggccagacctcctgaagatgagggggcatttgcctgattttgagccttatctgttttattcataaattaatcagcctcctttatatttggaacttcggatgaagaggtaatgcactgcatcatataatcctcattgatgtcatcgccgtacagaatccgttccggcctgccgtcctttaagataagtaccttgtggcacaaggtgacaagctctgcaagttctgaggaaacgacaatgacaccggcatgactttctctggcagcagatttaattagctggtaaatatcctgtttggtgtggacatctaccccccttgtgggttcatccagcaagaatatggtgggtttgtggataaaccaacggccgaacagaagtttttgctgattccccccactaagtgaattaggcgcttccataatagatggaactttaatttttagtgcctgtacaatgttctttaggtaggaattttctttttttgtgcgtatcagcctttgcttgctgtatacacggtggggcatgaggagtgtttcggggattggcagtgtcggaaacaatccactttcagctctgtcttctccgatgtaggcaatgtttttatctaatgctgcctgaggagatttgggcatatacccttcacctcgaagtttcaagcgaatatggggatttttctgggctccccagacagcgcgcagaagggaactccggccggaacctgctaaacctgccagacccacaatctcgccctccttaatggaacaggagatgtcgctgttttcccattctatattcagtaattcatcgtttttatttatttctttgtaatcatctatggaaaccgcttcttccataaccagcgtacgcccgatcatgtccctgataatatcagcatcacttttttctgacatgagagctccctcagtgacggtttgtccgtctctgaatatggttatacggtcacagatttcacggatctcgttcatacggtgagagacgaagatgataccaagtccctgagcggacaattttcgtataatctggaacagactttgggtctctccaaaattcagagatgaggttggctcgtcaaacagaataattttagcccccatgcttactgcccgggcaatctctatcatctgcatctgatctgcccggagtgtagatacttcatctctcagtctgatgttggctgctgcctcgccaagagtgaggagtgcttcccgggcaattttatcggattccttccagtcataaaagccatttttattaatatccggattgcagagggatatattttcagaaactgtcaggtggggaactaaggaaagttcctgatacaccactgctatacctttttccatggcatctttcggagatttaaagcgaatctccctgctgtttagaatgatctggccgtcattgggcatctttgaaccgccaatgatccctataatggttgatttcccggctccgttaccgcccatcagagcatggatttccccggggtagatggagagagaggcaccgttgagcgcttttgtccccccgtatatcttaacaatgttatgcatttccagaaggggagtttttccatgtcccatgttgagacctcctttctttgtccgcgcaaagcctcatgagagaactttgcacggaggtttgctataattttaataagagccggctgattccggataaaccagacgaaggatttcctgaatttcaggatcatcaacattttctgtggtaactaacggttccggaagaggaatatccttttcttcaatcgcttcacccttgatcgctttgaataactgctgtgctgctactagcccctggccgacggcttcctgtaccacaatgccgtcaattttaccctctcttaaaagtgcaatagattccggacttccgtcagaggataccacggatatcttacctgttaatcctgctgtctctaaggccagaacagcaccggtgccagcctgctcatacatgccataaatccctttgatatccggatgagcggtcagaaggtcggttgcttctgaggttgcctcgcttactgtaaggtcaggcgtctggataacctgtacgatttctacgctggcctcttcacaggccttttcaagtcctgccatcttgttctgcgcattggtacggtccatgggaagcgccagaacgccgatgctgtttccgccaagctcttttacacgctcacacagatatttgccgttatcgtaccctgatgtgtagtcatcagccgtaacacagcaggcgtagttggatactccttcctctgcgccgatagctgcaatggttaccggaatgtttgcttcctctgcgggatcaagcacggtaggacagctggtggagcttaccggacttagaataatgccgtcaacgttctgggtgattgcagtgttaacattagaagcctgagttgtggtggaattctgtgcatcgtaggttacgaattcaaccccttcttcctcacaagcctgttttactccctcttctacccactgccaataaagaatatcttttgacggtgcaagatatacaattttcttgccctccaggctgccgcctgctgtttctttgtctccggaatcctttgtttctgcggtgtctgtcttcgcggatgtgtctgcagcttcttctttcttatcaccgcacgctgccatagaaactaccaaacctaatgttaataaaatacttaatacctttttcatgtaaaatcctccttaattgttttaatagtctttttccccctgtgcgttgccgccgtaacctcccttcttttgtggtttcctatgcattttgatgcattatttatcattaaactaatactttaatgataattttaaattttaattgaaattatcggtaaaaagcggcatgactttttgagtcatgccgctttttatgccagttacaggtagccaaaccgcagttttttcatctcagccttcttttgatccgggagaacatgggaatacaaatccatggtggtggaaaagttctgatgtccgaggatggactggagaaccttcggtgccatgccagattccatacaccttgtagaaaaagtatgccgtaaggagtgaggggtcatagggggaaaggggatccctgccttttcatttatgtatgctacaatcttattaatatctgcatttagcacgccgtggcagagaggctttccggactttgagggaaagaccagctcatccatatcttccagctggggacgttcgtttgcctggctttcagggtggggctgtttattctgcaagtcttctaacagctctatggccttcggcaaaagggggatttttctataactgcttgcagttttgggagagtccctaaagcagccctgctgtttggtatattttatggtgccggtaaccatcagggaagcattgggaaggtctacgtcgcaccatctgagtgccctcagctcacctacccgcatgcctgttaaaagggccagagagtagacgggaaaataagggcttttccgggcataacttagaaaaatttcctgttctgttctggaaagtgcctgttgacggggcgcggagtgctgccggggcagttcgatcttctgcactggattatgttgcaggagattcagtctgcaggcctgcttaaacaggctgttcaaaagcgtataacacaaatgaacagtattattggaataaccggactgccttaaatcatagaagagctgctgcagattgtaaggggaaatattggccagcttcatctgaccaagggagggagatagataattgacataatagttatgataggtatccacagtcccctgttttacggaaagagacttatatttattcagccacaggtcaaaccagaagtcaagagaaggggtacttcccatacccggggcgccgtgctctatttcatatctggtattgcgcagcttttcggttactcctgtaagggtcctgtgatacacggcatagcgtttgccctgataagtaaatctgccctgataggacttattaggcagctgtataattccccgccccaattctcttcctttttgatcttttcccatttcttaaaacctcctatataatttgtgccatctatatgccaatttgttattgatgggacgtatggcatatgcttttatcagtatataatttttggtctccaagggaaatatatggataaaaaaattcggagaattctgttgacttaacggaaaaacatgtaataattaagggagaattgcggactgcctggcagagggtatttgctgcataagagtttggaggaatgagtatggataaaaatgactgtaaatataaaaaatatatagaattgctgaaaaaggagcttgtgcctgctatgggatgtacggagcccattgccatagcctatggagcggccaaggccagagaggttctgggggggctgcctacttatactaagattgctgtgagtagaaatattgttaagaatgtaaaaagtgtggtcattcccaacaccaacggattaaagggaatagacgcagcagcggcagcggggatagtcgccggcgaggcggataaggaactggaagtgatatccgcagttcccgaggataagaagggggagataaaggagtatctggaggcaaactcaattgaggtagagaccgaggagggggatctcctgttcgatatacagattgagatgtgtaaaggggaggagcaggtaaagctaagaattaccagatctcatacgaatattgtctatattgaaaaaaatgggaaagttctgctggagagcagctgcggggaggcaaaggaaaaggaagatggtgtagatctgctgacagtgaaggatatcgtagactttgcggagtgtgctgatttagaagatcttgcagcttatatagaaccacagatacagtgcaattatgccatagcccgggagggtatccggggaacctacggagcaaatatcggaaaggtactgctgaattcccaggagaatacggtgcagaatcgggcgaaagctatggcggcggcaggttctgatgcccggatgagcgggtgtgagctcccggtggtgattcttacaggcagtggaaatcaggggatagcagcagcagttcctgttattgtctacggagaagagatggggagcagcagggaggagcttatcagggcggtggccgtctcggacctgattacgatccaccagcgatccaggattggtaagctttctgcatactgcggcgctgtaaatgcggggtgtgccagcggtgcaggcatagcctatcttcagggaggcaggtttccggaaattgctcacacgattgtaaactctctggctgttgtttcaggaatgatctgcgatggggcgaaaccatcctgtgcagctaagattgctatttctgttgaagctggtatcttgggataccttatgtaccagcagggacaggagttcagagggggagacggaattgtaacaaaaggggttgacgagactatttacaatgtagggcagctggggaaagatggaatgagggagacagataaaaagattgtagatattatgatgggatgtgtctcaaaggagtaaatttcgcaacgatgctgtttgacatttcctctttcctgtgataaagtaataataacttaatagagatcttcagggcagggttcgtttccctaccggtggtatagcccacgagccgcaaggcatgattcggtgcaactccgaagccgacagtaaagtctggatgaaagaagataacacataacgatcggacggtgcagctaatgctgtgcaggtctgaatttcttgtgatggttcagctctgaaatgtttatcatttcagagctttttacatgtgggaaaacaaaacagtgtactgttgtgtgccgtttatctgatggagcgttatggagtgtgctgtgccctgaatatttttattcagggcatttttgtgattggtctagaataaaggaggcgcagtacaattgacagaggatgagaagtatatgcaggcagcactggagctggcaaagaagggtgccggatttgtgaatccaaaccctatggttggggcagtgattgttaagggtggcagaatcataggccagggctttcacgagaggtacgggggccctcatgcagagcgcacagcactggcatcctgcagagagtcgccggagggcgcagtcatgtatgtgacattggaaccatgctgccactacggaaagactccgccctgcacagaggctatactggagagcaggatacgaagagtggtggcggggtgtgaggatcccaatcctaaggtggcaggaaaagggcttcgctgtctcagaaacgggggcgtggaggtagatcttggaatactggaaaaggaatgcatttctctcaatgaagtattttttcattatatccgaaagcagatgccttttgtggttatgaaatatgcaatgacaatggatggcaaaattgccacacggaccggtgcgtctaagtggatcaccagggatgctgccagaaggagagtacatgaggaccggcaccgctgtgctgcggttatggctggaagcgggactgtggcagcagatgatcctatgcttacctgccgcctgccgggaaggagaaacccagtgagaattatatgcgattcacggctgaggattccattgggctcccgggtggtcactacagccagtgaggtacctacgtggattgccaccgcaagcacggaccaggagcggtggaaaagatatcaggaagcgggatgcagaatcatttatgcagagagcggtatacaggggcacctggaactaaaagagctgatgaggaaactgtaccaggagaaaatcgacagcattcttctggaaggaggaggtacccttaatttttcggcgctccagtcagggattgtaaataaactgcaggtatatcttgcaccgaagatttttggggggatcagtgcaaaaactcctgtagagggactgggggttgctgtgccaggggatgcgtatatccttaccaactccaggattgagaccctgggagaggattttctgatagagagtgaggtggaatacggtgttcacagggataattgaggagataggagtgattgccggtataaccagagggaaaaagtcttctgtgctgcagataaaaggagaaaaaatattcggggatctgcggcagggggacagtgtagcggtaaatggagtgtgtctgactgccgccaaaatccagggaaatacgttttatgcggatgtcatgtgtgaaactttaaatcgttcttctctgggaagccttcagacaggcggcagagtgaatctggaacgggcgatggccgcagacggaagattcggggggcatatagtatccggtcacattgacgggactggcaggattctggaggtaaacagggacgacaatgctgtctggtaccgggtgggggcaccggagcagattatgaagtatattgtagaaaaaggctcagttgccattgacggaatcagtcttacgatagccagagcaggaaaacaggatttcagtgtttctgtcattccccatactgcgtctcacacggcactgtgggagagatccccaggaagtaccgtgaatctggagaacgatgtgatagggaaatacgtagaaaagctgatgggaacggagcgggtgaagaaagataccaatggggtaacgatggagctcctttggaaggcaggatattaattgatagatgaggaggacataaaatgggtcagtacagcacgatagaggaagctctttttgagcttcaaaaaggaagaataattattgttacagatgatgaggacagagaaaatgagggagattttatctgcgccgctgagtttgccaccacagagaatgttaactttatggctaagtatgggaaagggctgatctgcatgcccatgggggaggagatttgcagaagactggagctgcctcagatggtagtgaagaatacagataaccatgagactgcatttacggtttccattgaccatatatctacaggaaccgggatttctgctgaggaacgttctgttacggctatgaagtgtgtggaaaaggaggcagggccggaagactttcggcgtcccgggcatatgtttccccttctggccagaaaaaatggagttctggaacggggcggccatacagaggctacagtagatctcatgcggattgcagggcttgaggcatgtggactttgctgcgagattatgagagatgacggaactatgatgcggggaaaggaactggaggagcttgcagagcaatgggatctcaagctgattaccatcaaagcccttcaggagtacagaaagaaatatgagaagctggttgaccgggtaacatgtgcccatatgcctacgaaatacggagatttccagatttatgggtatgtgaacaagctaaacggggaacatcatgtggccctggtgaagggagagataggagatggaaggaatctgctgtgcagagttcactcagaatgtctgacaggggatgcctttggttcttcccggtgtgactgcggccagcagctggcagccgcctttgccagaatagagcgggagagccgtggcgttcttctgtacatgcggcaggaagggaggggaatcggcctcattaataaattaaaggcctatgagctgcaggaacaggggatggatacggtacaggcgaatctggcgctgggattcaaagaggatctcagggaatattatatcggagcgcagattctaagggatctgggtgccagaaccttaaggctgctgacaaacaatcctcagaaagtttatgagctgggagactatggcatggaaattgtggaaagggtaccgcttcagatgaaggctacggcccatgatatcgtttatctgcgcactaaacaggagaaaatggggcatatactcaattattaaggataggggatatgggattaatgggaaatgtaaataagatgaaaatggaggagacagataagttatgagagtgtatgaaggaaaactggtttctgaaaaaataagggtggggatggttgctgcccgttttaatgaatttattgtatcaaaactaattgaaggtgctgtggatggactgcggcgtcatggggttgaagatgactgcattgacctggcctgggtgcctggagcatttgagatacctctgattgcctctcagatggcaaaaagcggaaaatatgacgcagtgatctgcctgggtgcggtgatcagaggaagcacgtcccattatgactacgtgtgcagtgaagtatcaaaaggaattgcccaggtatctctgaaaagcgatattcctgtgatgtttggggtgctaaccacagatactatagagcaagcgatcgaaagggcaggaacaaaagcgggaaataagggatttgactgtgcggccggggcaattgagatggtaaatctgatgcaggaaatacagggataaccgtatgaatcttttgtttgattacgacgggacccttcatgactgtgccagaatctatatacctgcttttcgggaggtataccgccggatgacagaggccggacttaccccttaccgggaatggaaagacacagagattataaaatggctgggatacagcccccgggatatgtggaatgcctttctgccttcgctatctgacagggcaaaagagacatacagcgaagcgattggaaccttcatggaagaacagacagctttaggaaaggcacatttgtatccgggtgcggaagtaatgctggaagaacttaaaaaagaagggcatgttctgctgctcctcagtaactgcaaaactgcgtatatggaacaacacagaaaaatatttcagctggacagatattttacaggatattatcctgcagaagcgtatggatatcagaaaaaatggaagatatttcccttaataaaaaagaaacatccgggagcctatgttgtaataggagatcggtttcaagatatggagataggggcgagatgggggattccggcaattggctgtacgtatgggtatggaaaacaggaagaactgaggaaagcgaatgggatagcgggaagtatagaggaggtaaaacagcagatagatagaattggggacagggctgggtgaaaaagggacaccctgaatccattttgggacgtgttctttctggaaagaacacgtcccctttttactttaaagtaatggtatcccatgtgcctcggcataatctaaggtttttcggggccagatggaggcctgcacttctccgatgtgggccttacgcaggaagaacatacagatacgggactgcccgattccccctcctacggtgtagggcagctttccctccaggacggctttctggaatggaaggccggcccgttctggacatcctgctttttccagctgtctgaggagtgcagcctcatctacccgtattcccatggaggagagttccagggcaatatcaagaaccggatagtagacaatgatatctccgttaaggctccagtcgtcatagtctggtgcccggccgtcgtgcttttcaccggatgccaggatgtcaccgatctgcatgataaacacagccccatattcttttgcgattttatattctcgttccttgggggtgcagcccggatatttatcctctaattcctgggaggtgataaagaagatgtcttttggcagtatttcttctatgtagtcgtattgaatggccatatatttctctgtttttttaaatactttgtaaaccgttgccacgatctctttcagcttttgttctgtgcgctcttctttagagagaatcttttcccagtcccactggtccacgtagagggaatgaatattgtctgtatcctcatcccggcgtatagcgttcatatctgtatacaggccttcaccgtaggaaaaaccgtatttgtaaagagcataacgcttccactttgccagggaatgaacgatctctgccggggaatcctcctgttctctgatgccgaaggataccgggcgctcaaacccgttcagattatcgttcaggccggattcgggggttacgatcaggggtgcggaaactctcagcagattcaggcgctggatcagtgtctgctgaaaaaagtctttgacagttttaattcctatctgggtatcgtacagactaagctggggggtatatccctctggtataataaatgattccatatttattctccctttttggtgttggttaaaatatatattctctaattctttataatataacaaaacccccttaatgtacaacataaaattaaaaaagcagctggtagaacgcctgagaaaagagaatgctgacagttacattggctttaaatttttattgagcctctctaccatccatgtcagacgtttggcacgtcccctatctgtctttgcgtcaaggtaggcacgggtatatgttttctttacggataagggcatggacaaaaagttagaatatgcaggttcgtaatcttttaatatagcggataaagatgaaatctgatcttctgtaacagctggggctttgggagcatcccattgtccgtttttctttgcctcgtctatttttgccctgccgtagtcggtcatttttccctgatattcaagcttttgggccagttctttgtttttttcagaccatttactgttttccctgcgcagggagaaatattttttataggttttatcatcaatacttttcatctgcccatctatccagccaaaacaaagggcttcttccagcgcttcacttgccttaagtgttttcggcccccctgctttgccaaatagaagccagatacctgtgtctgacagactgtgctgctgcagccaatttctaaattcttcccgattgcaaaactccattgtttcgttaataggacagacctccttttgcctatggttgaaaggctgatatctcgattacagttacttgtcttcggactttagtttatgtccgtattctaccatgtactggctccttcgtctatcaaaggaaaaaaattagataaaaatctaaaaaacaccttgcaatgtacttttaagtgtgctactatcaatatcataaattttgaaaatgcaaagaaagagactctgttctctgaaacttgacaggaattcggcgtcaccgactgagagcgctgatggagggaaggagacaatagggaacactctggagcagaccggttgaaacagtagtaggtcggtacgtggcacgcgttaagtgcagagtgacaggagcacagcaatagcagctctcctgtaacgcgggtggtaccgcgggagcaaagagatcccgtcccggaatatctaaggatattccgggatttttttgttatataggaaacttcattccctttgtaacaaaaaaccctccgggggatcacactgcgacagcccgccgcaggcggagattgcgctttcgcgcaatctttcttatatacccatactttgttctttttcaaaattattaggtggcagccatggaaacaagagtcagacggtgaagaacgtgcacatcttcccggattcaggatgaaatgtaaaggagagaaaactatggaatttttaaaaggtgtcaaagagccggaaacattagaaatttgccagttacttcaggagggaatggaaggtaatcaggtaaaagtgaatggcaatgtacacaccatccggaatatgggaaatgttgcatttattattttgagaaaacgggaaggtctggtacaatgtatttatgagcaggagacctcggaatttgatatcaaagaagttaaagagggggcggctgtagagatatgcggagttctgaaaaagtcagagaaagctccaaacggcattgagatagaggccaggggcctgaaaatcttaagcgagcctgctgagacaatgccgctggctatatctaaatggaagatgaacacatccctggaagcaaaattaaattaccgtcccattgccctgcgcaatatcagagaacgggcaaagtttaagatacaggaaggtgtggtcagagggttccgcgatttcctgtatcagcagggctttactgagattcatacacccaagataggtgcaaagggagcagagggaggagccaatatctttaagctggattatttccatcgtcctgcagtgctggaacagagccctcagctgtataaacagatgatggtaggtgtttttgacagggtttttgaaaccgggccggtatttcgggcagagaagcataatacaaaacgtcatctgaatgagtatacgagcctggatctggaatttgggtttatccagggatttgaggacgtcatggctatggagacaggatttctccagtataccatggagcttttgaaaaaagagtactccagagagcttcagatattggatatcatgctcccgaaggtggatgagattccagcagtccgctttgacaaagcaaaagagctggcagcagaaaaatacggtcgtaagatccgcaatccatttgatttggagcctgaagaagaggtactgatcagccagtattttaaagaggaatatgacgcagattttgtgtttgtgacccattatccttcaaagaaaagacctttttatgccatggatgatccggaggacaggagatttactctgagctttgaccttttgttcagagggcttgagattaccaccggagggcagagaatccatgactaccggatgctcactgaaaagttagctgccaggggaatgacggaggaagggctggagcagtatctggatacctttaaacacggtatgccgccccacggtgggctgggaatcggactggagcgacttacgatgaagatcatcggagaagacaatgtgcgtgaaactacactttttccgagagatttgtcaagattggaaccgtaacaggggcggagctgccgccccaaaaagagccggggaggcagataggaagcgcttatgagtaaaaacattggaacttgttttctgtgcggtggcagagtgagaaacggcatctgcacagagtgtggaatggacaacaggaaatcggacgacagttaccggttaaacagcggggaatgtgacagggaaccacttacccatgtacatgttcatgaaaaagaggagtcagaaaagaaagagaaagtaaagaaagccgcggacagtgagagaaaaaaaactggaaactcaactgccaggagtgcaggggagaggccgaaaaattatgggaaatactatcacagcagcgggaaaaagccagcagccaaaaagactgggctatgggcagttataattattgcagtcataggaattctgcctaatatcggaaaatctgtatatgatgcctaccaggagaagagggtggaggagaccctgtcttctatagaaaacttacaggattttcaggacagctatgatccctatcagtatgtggatgagagtataccggaggaaggggagtattttcaggcagagctgtcggccggatattatcagattggcatagatctcccggagggaatctataaatgcacccgaaaagacggcactggttatattaatattgtggacagtgcgcacaatgtttatcaatatgaaagctttcaggaaaatgaccctgaggaaatcacagatttgaaaatgtttcagggtgcagtacttcaaattagcggcggggctgtgtttactctggagacagaaaacggccagacatcctcaatggaggaggctgagccgaatcctctcaccgatgagctgacgctggagggatataatacggctggaacagactttcccccgggaacctacgatgtaagtgccccagatgattttgggctgttagagatagaactgccgggcgggggtgaatccccatacacaattagctttctgctggattcccagcgcaccgaagagtatcccggatacagccaagaggtcaggcatttatatcttccggagggaacaaaggtatccgcagaaggatttgagattaaaatggtacccagtgagagacgtacctcattggattataaggtatactatggtttatggtaactgactgacagaagagtaaggagaaattgtatgtctgagagaatcagtgatgagacaattgagtatgttggaatactggcgaagctggaattaagccaggaggaaaaggagcaggccaaaagtgacatgggaagaatgctggattatattgataagctgaatgaactgaatactgagggtgtagagccaatgtcccacatctttcccatccataacgttttccgcgaggatattgtaaccaatggggatgacagacagaatatactggccaatgcacctgaaaagaaggacggagcctttcaggtgcctaagacggtagagtaggaggaaaacattcatgagtatcttatcattaacggcagtccagcttggccaaaagataaaagagaaggaaatcagtgtgagagaggcagtagaggcgtctctggaacagataggaaaattggacagcgctctgcactgctatgttacaacggatagaaaaaaggcactggagcaggccgagcatatacaaaagagaatagacgaagggacgttgaccggtcccctggccggagtgcctgcagcgctgaaagataacctatgcacagaggggatgcttacaacctgcagctccaacatcctgggaaactttgtacccacctacacagcggaagctgtccggaacctggagcggcagggagctgtgatattggggaagacaaatatggatgagtttgccatgggaagtacaacagagacttcagcatacggcataaccaggaatccctggaacactgaccatgtgcccgggggctcctcaggcggatcctgtgcggcagtggcggcgggggaatgtttttacgcccttggatccgacaccggcggttctatccgccagcccagttccttctgcggcgtgactggtatcaaacccacctacggaactgtatcccgatatggactgattgcatatggttcgtctctggaccagatagggccggtagccagagatgtggcagactgcgcggctatattagaaacaattgcttcttatgataaaaaagacagcacatctgttcagcgggagtcctatgattttacagccgctctggtggacgacgtaaaaggcatgaaaataggaattcccagggattatctgggagaagggctggagcccgaggtcaaatctgctgtccttcgtgcggcaaaagtcctggaggagaaaggggccagcgtggaggaatttgagttgagtctggttgaatatgcaattcctgcatattatgttatcgcatctgcagaagccagctccaatctttcccgattcgacggggtcaaatacggataccggacaaaggagtatgacggcctccacagtatgtacaaaaagagccggtccgaaggttttggaccggaagtaaaacgcagaattatgctgggttcctttgtactgagctccggttactatgatgcctattatctgaaggctctgcggacaaaggctctcatcaaacaggcatttgacaaagcatttcagaaatatgatttgattttaggaccggtagctcccacaaccgccccaaaactgggggaatctctggaagatccgctgaaaatgtatctgggggatatttatacgatctctgtcaatctggcgggtttacccggaatgagcgttccctgcggaacagattccaaaggactgcccattggactgcagctgataggcgactgttttcaggagaagaaaatcattagagcagcctatgcctttgagcagaccaggtcatacgaggagcctaatctggagagagtgaaaggaggagagaaagcatgagcaggcagtatgaaactgttataggattggaagtccatgtagagctggcgacgaagactaagatattctgcgcttgttccacagaattcgggggtgcccccaacactcatacctgccccgtctgcacgggcatgccgggctccctcccggtattgaataagcaggttgtggagtacgccctggcagtggggcttgccacaaactgcaagattaaccagtactgtaaatttgaccgaaagaattatttctatccagacaacccgcaaaattatcagatctctcagctgtatctccctatctgccatgacggaggaatcgagatagagacatctgcagggaaaaaggttatagggattcacgaaattcatatggaagaggatgcgggaaaactgatccacgatgagtgggaggactgctctttggtagattataacagaagcggggtacctcttattgagattgtctcagagcctgatatgagaagtgccgaggaggtaacggcatatctggataagctgagactgattatccagtatctgggagcatccgactgtaaacttcaggagggatccatgagggccgacgttaacctctctgtgagggaagcaggcagcggacaattgggaaccagaacagagatgaagaatctgaactcctttaaagccattggaagggcgattgaaggtgaacgtgcacgccagattgaattgctggaggaagggaaagcggtagtccaggagaccagacgctgggatgacaataaggaatactcctatgccatgcgctctaaagaagatgcccaggattacaggtattttccggatccggatctggtccctgtggtgataagcgatgaatggatacaaaaggtgaaagagagacagcctgaacttcgcacggagaagctgctgcgttacagaaaagaatttgatattccccagtatgatgctgagattattacggcgtccaaaaaactggccgatatctttgaggccgccaccgcagtgtgcggcaaaccgaaaaaggtttctaactggctgatggtggaaaccctgaggcttttaaaggaaaaggatatggagccggaagacatccggttttcccctgagaatctggcaaagctggtgcttctagcagaggccgggacgattaacagtactgtggcaaaagaagtctttgaagcagtgtttgcccaggacattgaccctgaagcctatgtggaagaaaggggactgaagaccgttaacgatgagggtgctttaagagaaactattgccggagttatcgcggacaatcctcagtccgtgtcagactataggagcggaaaagagaaggccattggctttctggtgggccagactatgaaggctatgaggggaaaggcaaatccttcgtcagtaaataaaatattaaaggaattattgcagtagctgttaagtatgctataataggcaaagaggctgtaattcctgttaagagaacctgtgaatctctgttcggtttgcaggttctatttttctgccccggcagtagaaagagaaaaaaataggaagcctatttatataggaagaaatacatacagggagatgaatatgcagattaataacaaacaattttaccgtacagtggcggggctggtgctgcctatggcactccagaatctgattaatgtgggggtcagctcagctgacgttattatgctgggaaaggtgggggagattgctctgtctgccgcgtccctggcaaatcaggtgttctttatcctgaatctggctctgtttgggcttacttccggtgccagtgtactgactgcccaatactggggaaagcaggacacccgaaccattgagaaggtaatgggaatgtcatttcgtattgggcttcttgctgcttttgtagtgacggccgctgtttggattgccccggttcctattatgagactttttaccaatgaggctgtgattattgaggaaggcgtacgctacctgaaaattgtatctctgtcttacctaatgtcggcatttacaatggtatatctgaacattgtgagaagtgtggagagagtagtcattgcaactgttgtgtacagcatctcactggtggtaaatattatccttaatgctgtgtttatctttggacttttgggcctgcctgctatgggtgccgccggagcggcattggggactgtatgcgcaagagccacggaggttataattgtcgttttttacgcggtgaagataaacgacaccgtaaggatccgggtgaaggatctttttgtgcgggacagactgctgggaagggactttagagtctatgcatttccggttttgctcaatgaggtggcatggggcagcggtatggcagtgataacggccatagtcggacacctgggaagtgccgcagtggccgcccattcagtagctcaggtaagccggcagctgtctatggttgtcagctttgggattgccagcgctgcctccattatggtaggaaaatccataggagagaagaaagaggagctggccaaggagtatgccagaagattcctgaagatatctattattctggggatttgcggcggcgtggtgattcttatgatctctccggttgcatgtgctctgctgaatcttacagaccaggcaaaggggtatctgaagattatgatgatttttatgtcttattatgtagtgggacaggcgtataattccactatggttgtaggaatctgcagggcagggggagatactaagttcggcctggtgctggatgtgggaataatgtggatatgctccatcggcctgggcatgatcgcagcctttgtgcttaagatgcccatgccctgggtttatatcttcctggtgagcgatgagatcatcaagataccattttcggtaaaaaggcaccatacatataaatggctgaaaaatgttaccaggtaaaaggcagcatattcacaagaatataggacgtaatacgtgttaaaaagtgcaggtattcatgcaaaaatcttaaaaaaatagcaataatagagaaaaactgcaagaatataaaaaacatctttcatttttttcgacaaatgatataattatccttggctaaagaaaaagggggacatgaaagatgaagtcatatgattttttgttggatctggcgataattttgctgagcacgaagctgtttggactcttaacacgtaagattcgcatgcctcaggtagtaggagcgctgctggcaggcttgcttctgggaccggcagttctgggtattttaaagcagactgaatttatccatcaggtatctgaaatcggggttattgtgctgatgttctgcgcaggactggaaaccgatatcgatgaattgaagaaaagcggaaaggcttcctttatcatcgcgcttatgggagtaatcgtcccgctggccggaggttttggggtcgcctggtactttaaccgtccgggtatgctggaatcaacagcagacacaagtcttctgctccagaatatttttatcggcgtaattctgaccgcgacatctgtaagtattacagtggagaccctcaaagagatgggaaagctgaatacgaaagcgggaaatgctattttgggtgcagccattattgatgatattcttggtatcattgcactgacactgatcaccagcatggctgatccgtcagtgaaaataggtgttgtcctgtttaagattgccggtttttttgttgctgttggactgggcggatatctgatacatattctgtttaaaaaatgggttaccggatataaaagggatctgcagagatttgttattattgcatttgttatctgccttatttttgcctatgtggcagaagaattcttcggcgttgctgatattacaggcgctttctttgcgggactcatcatcacgaagacgacaaagacgaattatatagcccgcagattcagtacactgtcttatctcctgctttcaccggtattttttgcaagtatcggtatccaggtagaactgccggagatgtcatctatgctgatcgcattctctgtgatactggttcttgttgcagtacttactaaagtagtgggctgcggcctgggagctaagatgtgccactattccaataaaaatgccataaggattggaaccggtatgatttcaagaggagaggttgcgcttattgtggctgctaagggagacagtgttggcctgatgtctgcttcccttttgggacctgtggtagtggtagtagtaattacaactattatatctcctattcttctgaagctggcattctcccacagtaagaaaaagatccaggagccggaagagtatgtgagcaacgatttggcgaaagtgtatgaagatgaagatataggaaaccaatatatggggactcgtgaatagacagaaaccggtagggtaggcctttggcatacactaccggatttttttgcctttttttgtatattagtgattgacaaacacataaggtctttatataataaaaacgtaaatgataattattttcaatatcaataaatgcacagggagacaaaaatgagtttagtggaagctaaggttggcagcgtataccgggtgacacagatgctggtggaacaaaagatcctgaggcgtcttgaggccctggggattctggagggtaccagaatagaaattctcaacagaaagaggaatggcgccaccattataaaagtaagaggcgccagatgggcactgggcagtgacatagcgtccgggattaatctggaggattatacagcatgaaaaactatatcagcgttgcgtttgtaggcaacccaaactgcggaaaaactactttatttaatgcgtttactggggcaaaccttaaagtggcaaactggccgggtgtgacggtggaacgcaaagagggagagaccagctataaaggacagaagataaagctgattgaccttccgggtatctacagccttacttcttattctatggaggaaaaggtttccagaaaggcgatcctggatgaggagatcgatgtcattgttaatattgtagacgcatccgctatggaacgaaatctttaccttacacttcagcttctggagatgggtaagccggtgattctggcattgaatatgatggacattgtggaagagaggggcatggaaatagacttgcatcgtcttccggagatgctgggacacattcctgtggttcctgtatctgccaggaaaagaaccggcctggatgtgctgctgcatgcggtgaagcaccattatgaagagcagaatactgacccagtggtttcctacacggcggatattgaagataaaatagaggtcctggagcatatgcttcatgaaaagtggcccaaggatacgaatcttcgctggcatgcactgaagattctggaaaacgatgaggagattttaaaagagcatccactggatacaagtgaggtggtggataagaattatgaaaagatcatcatcaatcaaaagtatgattacatagaggaaatagtagaggagacgttgttttataaaaatcaaaaagaggaaaaaacagagaaaattgaccgtatcctgactcaccggatctggggagtaccggtgtttctggggattatggctctggtgtttttctgtacctttacggtaggagatgcggtgaaggggatttttgaggcaggacttgattatgcctttgcgggaatgacacatcttctcaccagtctgcatgcctctgactggctggtttctctgatagtagatggaattatggcaggtgtgggaggaatactgacctttctgcccaacatttttatcctgtttctggcactggctgtcttagaggacagtggttatatggccagggtagcctatgtcatggacggaatcatggggagagtcggactttccggaaaggcatttctcccaatggttcttggcttcggatgtacagtcccggctataatggcgtccaggacattagaaaaggagtcagacagaaagaggaccatgcttttgaccccctttatgtcctgttcggcaagacttcctatctatgtactttttgcagatatgttttttggaaagtatgctatgattgtagcattttctctctacgccttgggactggtgatggccattcttttggcccttatcctcagaaaattcagcaaaagcaagggggaggcgaaccttctcatagagcttccggaatacaagacccccaatgccaggactatctggatttatgtgtgggagaaggtaaaggactatctgacaaaagctggaacaactattttcgttgcatctattgtaatctggttcattttgaattacaataccagcgggatggttacagatgtgacaaccagcttcggagcttcaatcggaaagtggctggagcctctgctcgctccggcgggcctgggaatgtggcagatttcagttgccctaatctccggtctttctgccaaagaagtggtaatctccagtttttctgtgctctacggtatcagcaacattaattctccagagggcatgggacagttatcccagatactggcgggtcagaatttcggagctttgaatgcctatgcgctgatggtgttctgcctgctctacactccctgtgtagctacactggctacgattcgcaaggagacacactcttcgaagtggacgattatgaccgtattctttcagctggcagttgcttatattgccgctgttctggtatttcagattggaagcctgttttaaggaggtagaagtatggcaacagtattgataggagttctgatatttggttacgccgcatttgtcatccgcagaaaaataaaagatgcgaaaaacggaaaattctgcagctgcagctgtgaaggctgctccaaaggctgcggaaaggccgtgaaaaagtagacaggagagttggatgaagattctgctagcggcagtgaacgccaaatatatacattcgaatctggcggtctattctcttaaggcttttgccggagaatacagagaacagatagagattggtgaatatacaataaatcagaaaaaggatgagatattaaaaggcctctatcaaaagaggcctgatatcttatgcttttcttgctatatatggaatatttcttacgtcacggatctgataacagaggcggccaagattatgccctataccagaatatgggtggggggaccggaagtatcctatgacggggaagcgttcctgaacaagtacccccaggtggagggggtgatggtcggggagggagaagaaacctttctggagctggtgcggcactatacggagggacggacatcgcttgaacaaattcctggaattgtgtttcgggatcgggggaaagggcagctgtgcagaacttctccaagagagattttggatatgagtatgattccttttccttatgagaagatagaagccttcaaccataaaatcatctattatgaaagcagcagaggatgccccttttcctgcagctactgcctttcttccgttgataaaagactgaggtttcggaaactggaccttgtataccgggaacttcagtattttttggatcacagagtacctcaggtcaagtttgtggacaggacttttaactgcaggagggaccatgccatgggaatctggacgtatatccgggatcatgacaatggggttactaattttcactttgagatagctgcagatctgctgacccgggaagagctggagcttatgaggactttgcgtccgggcctgatccagctggagatcggggtgcagtccaccaatgagaggaccatagaagctataagaagaaagatggactttgccagggtctcagaggtggtgagcgaggtacacaggggaaaaaatattcaccagcatctggatctgattgcaggtctcccctttgaggattataagagcttcggccgttccttcgatcaggtatacagactgaagcccaaccagctgcagctgggatttctcaaagttttgaagggatcttatatgcatgagaacgccggggaatacggatgtgtctatcagagcagagagccttatgaggtcttgagaaccaagtggctgtcttacgatgatgtactgaggcttaagggaattgaggagatggtggaaatatactataacagcggacaattttctacggttctgacggaaatagaagcaacagcatcctccccctttatgttttatgagacactggccgccttttatgaagaaaggggatatttttcagtctcgcacgcacggcttcggcggtatgatattcttttggaatttctaatggaatgggaccgcggacatctggaggagtataaagagcgcatgctctatgatttatatctgagagagaatctgaaaagcaggcctggctgggcaaaagacatggggagctatagaaataagatacacgcattctaccagagggaggaagagaccccccgttatcttaccgaatataaaggatatcaggcaagacagctttgtaagatgactcacatagaagtattcagcttccctgcagacgcaggaggggagaaggaagagagatggattctatttgactataaaacccgtgaccctttgactaatgacgctcttgccatagagattccgccccgggaactggaggaatagagtatttcaggagaggataaatatgacaaaaaggacaaaagagattctggatctgctggatgcagtgtatacaacagagtataagtgctatttgaatcatgatagtgcagaacagctgctcatcgctactatgctcagtgcacaatgtacagatgccagagtaaatatagttacagaatcattatttaagaaatatccggatatggaggcttttgcaaatgcggatttgagggaactggagcaggatattaagtctacaggcttttacaggaataaggctaaaaatattttaggatgttccagaaagttagtggaagagtacgggggaaaggtacctaatgatttggagattctcaccagtcttcccggtgtaggaagaaaaactgcaaatgtgatacggggaaatatatttcatgaaccaagtgtggtggtggatactcatgtaaagagaatttcgcggaggctgggatttacaaaagaagaggatccggttaaaattgaatatgatcttatgagggtacttcccagggagcactggattctgtataatattcagattattacctttggcaggcaaatctgttttgccagaaatcctaagtgtgaggagtgctttctcacgaaatactgtaaagagtataaggaacggaagaaaaagggggataaagcatgagagcatatgtaacccttgacctggaaaccacaggtctgcagccggataaggatacgattctggagattggggccattaaggttgtggagggaagtgtggcagatacctatgcaacctttgtggatccccggagggagataccctcaaggattacagagatcaccggtattaccggagatatggtggcggggcagcccgggattgagtctgcacttccgagacttctggagttctgcggggattatcccctgcttgggcataacctgctttttgactatagctttgtaaaatatggggcagccgggcagggcctttcatttgaaaaggaggggatggatactctggcaatctccaggaaggttttgccggatctgaagagccgcagcctgcagtacctgagaaagtattatggaattcctcaggacaaggcacatcgggcgctggacgatgccagaactacttaccttttgtatgaaaaactgagagaggaattcggccagagccatccggaggcattttgctgcagtcctctggtatgcagaataaaaaaacagtcacccatcacaaatgcccaaaaagggtacttgcgggatttgataaaatatcataaaatagaacttgatacagagatggattgtctgtcgaagagcgatgcctcaaaaattattgacggcattctttcgacgtatggaagaataaagaggtgaaaaaatgaatatgaataaccctaagacgaaacggattatcgccgggattattgcaggatttcttatactggcaatggtagttcccatgtttattcccggataagggggctaagatatttgtttcatgggatcatgggaaaagaaggcaggataaatatatgagaataggaaaactaccggagccggtgcttatccgttctgtactgaaagaaatcagccacagaagggaagaggttctggctggtcccgggattggccgggacagtgcggcagttgagattggtccgggggaagtattcgtactttcctcggattctgttacgggtgaggaaacttatacagtaaaccgcggtgtgtacgctgtggtgaatgatctggcggcctcaggagcagagcctgtgggaattatggtaacagtattgctgccgggcaaggcagatgaatctcatctgaagcataggatgcgggaattagaagggatctgccaggaattgcatctggaagtgctgggcggacatacagaggtaacacaagccgttaaccagcctgtgttttctgtgacaggtatcggtaagataaaaaaggagaacctgaagtccgtgtcagatataaagccagggcaggacttggtattaaccaaatggattggcctggaagcaaccgctgtaatagcccgagagaaggaagcggaattgctgaaacggttctctctggcatttgtagaggatgcgaagaattttgagcagtatctgtcggtgcttccagaggctcaaattgccgtggaggcgggagcagccgccatgcatgacctcagaactgggggcgtcttcggagctctatgggagatggcaagcgggggtggcattggacttgaggtagatctcagaagcatacctgtccgtcaggagacggtggaaatctgtgaagcgttcggactaaacccttatcagattacgtccagcgggtccctgctcattgcagtggaaaacggaaaccatctggtgagagcgctgtctcaaacaggcattcatggagcggtcatcgggaaaaccacagagggcagggagcggatactgaaaaaccagggagaagtaagatatctggataagccccagccggatgaactttacaaaatattataagaaagaagttaagaatatggcaagactgaacatcgtactatatgagccggagattccggctaacacaggaaatataggaagaacctgtgtagcgaccgggaccaggctgcatctcattgaacctcttggattccgtctgggcgaaaaagaactgaagcgggcagggatggactactggaaggatttggatgtgactacctatgtgaattacgaggagtttctggaaaaaaatccgggggcaaaaatttacatggccacgacaaaaggtccccgtacgtatacggaagctgcttatgaagaagactgctacattatgttcggaaaagaaagcgccggaatccccgaagaaattctgctggaaaaccaggagacagccatccgtatccctatgattggaaatatccgatccctcaatctggggaactcagtggcaattgtactgtacgaagcactgcggcagcataactttgatcacatgcagctggaggggcatctgacgaaatatgaatggagataaaagccccgtaccttaaaaagggacagggcagatcgagtttgggacgtgttccttttaaaaagaacacgtccccttttttattttttggatttgtcaagggtaaagatgaactcagttcccaccccttctgtactgattacattaatgtgctggttatgggcattgatgatttcttttacaatagccaggccaagcccggtaccttttctgtcctttcctcgggaggtgtccagcttataaaaacgatcccagattttagaaagactgcttctgggtattcccgcccccatatctttcacagagacaaagacggtatcatgtttttctgtggtttctatggttatggtagaatctttagggctgaacttgattgcgttatccaataggttgtatagtacctgctggattcggcccatatcagcggatacatagagtgtctgaccggccaggataagctctatggagatttttttctcccggcaggttccctcaaaggtggccactgtattttttatgactccatttatatcaaaggtggtaatatccagcatacgtcctttggcatccatatcatttaaagtgagaaggcttctggtgagcttattcaggcgctctgtctcaaatactacgatattcagatatttttcctgcatttcaggaggaatggtgccgtccaggatagcttctgcataccctttgatggaggtcaggggagagcggaagtcatgagacacattggcaacaaatttccgttgatagtctcccatcttgtccagttcgtcggacatataattcagggacgccgccaggtaacccatctcatcttctgtgctcaccgggatattatacttcagattcccggatgcaaattcatccaccccagtgatgattttcctcaggggccggtggatgatataattcaaaagcaccagaatggaggaggtaatgagaaacaaaatcaggaaaagtatgtatactacctgaagaaccgattctctttcctcgtaaatatgctccatgggctgatgaatggcaatatatcccctggtggtaaaattcagggtaatgggaaccagaacactcatagtatcatccgaaaagcggtgaaaaaaatggccgatctgatagtacccggaattgaatgacgccggatcaaaattaatgattttttccggagactgtgtattcaagtcctcgctggtgttcaggaggatctccccctgtggattgatcagccagatctctgagttctcataagagctcagggtagtcaggttatcatagatatcattgagagaggactggctgttgtaatattttgccgcatgggtattcgccacggcattggcttctttatagagggcagagctagaaaagtccacaagcttatgttcaattaatgtggaccctaaagtggagatggtgaaaaagccaatgaatcccagaatcaagtatgcaataacaaacttaagatacagggcatttttcattaggatttcacctcgaatttgtatccaatcccccatacggtggcaattccccaggagtcatggtccttgattttttccctgagacgtttgatgtgtacgtccacggttctggtatctccgatatattcgtatccccagatgtgatccagaagctgctctctggtaaatacctgattgggtgaggaggccagaaagtaaagaagctccagttctttcgggggcatatccaccgcctcttggcagtaaatgacagagtagttggtaaggttaattacaaggtccgggtattccacgaactttcctgtattctgggctgcgggttccggctccacatgaaaccggcggagtaccgcttttaccctggctactaattctttggagtcaaaaggcttgataatgtagtcatccgctcccagctccagaccgaggaccttgtcaaaaatctcccctttggcggagagcataataataggtacattcgacttgtggcggatttcccggcaaacttgataaccgtccatacccggcagcatcagatccagaagaatcagattgggctgaaaggatgcgaatgcattcagggcctcttctccatcatttacaatcatcgtatcaaagcattccttggtaagatacagggaaatcagctctgcgatattgttgtcgtcgtctacaattaatattttctgctttgcaaccattacaaaacctcctgattctattttttaaatgttacgatggttacgcccgcgtcaccctcaccgaattcggcgagatggaattcctctacatatttcaggcggcggagatagctgtgtatgccttttctcagtgcgccggtaccttttccgtggaccacacgcaccgtattcagatgggccagataggcatcgtccagatatttgtccagctcggaaatggcctcatccacagtttttcccaaaaggttgatctctgtttttacaaaggaagacttgctcatccggatcttacctgtactggttttctgcagggtggaggatgtaatcacgggttcgtctatgagctgaaggtctgagatgtgcacctgggaacggaggatgcccatctgaacaaagagcatgcccttggggttgggcagtgtgcttactgttcctttcaggttgagactcagcacttttacagaatcgcctatggacaaatcttttgctttgggcgccggttttttcttctgctcttttttctgagacatatttttttctactgtgttcatcttctggcggagcttttggcgctcttgttccagttctctggcggacattgtactttttccggccttattgaataccttgatggtctggtccgcgtattcctttgcctcgcgcagtaccctatgtgcctcttcgttagcctctctcaggaggcgttctctctgctgttccagcttatcctgcttttcttccaaccggttctttaactgttctacttctgttttatagcgttcaatctcttttcgctcattttcaatggtgactctgttctcctccaggtggctgatgacatcctcaaaggattctgcctcctgactcagctgttctctggctttgtcaataatatattcaggaagtcccagttttccggagatagcaaatgcattgctttttcccggaatgccaatcaacagccggtaggttgggcgcagagtctccacattaaactcacaggaggcattttccaccccgggagttgaaagggcgtagacctttaactcgctgtaatgggtggttgccatagtacgaatgccctgagcatggagatgggacaggatagagatagccagcgccgcgccctctgtggggtctgtgccggctcccagttcatcaaagagaaccagagagtctctgtcggctttttccaggaaagatacaatatttgtcatatgggaggagaaggtgctgaggctctgctcaatactctgctcatccccaatatccgcatatacttctttgaacacagccagagaggagtggtcaaaggctggaatatgaagtcccgcctgccccataagcgttaatagccccacagttttaagggaaacggtcttccccccggtgttgggcccggtaacaatcaacaggtcaaaatcccggcccagatggatatcgatgggcactacagaatgcctgtcaatgagagggtgccgggcctttttgatatccagaatgcctttggtattgaattccggtttggatgcattttgctgcttggccagagaggctctggcaaagataaaatccagttccaccagcagcttcatattatccagcagaacttccagatactctccggcagaggcacttaaggtggacaggataatctcaatctccgcctgctcttttagttccagctcccggatatcattattcagcttaacaattgccattggctccacgaagagggtagaaccggtagaggactgatcgtggatcattcccggcacctgtcccttatactcagcttttaccggaatacagtaacgcccatttcgcatggtgacaacggcatcctgaagataacttctggaatttccgctgacaaagctgtttaattctgtatgaatcctgtcattggtatttttcatagaacggcggatttgcttcaggcccggactggcatcatccgcgatctcttcttccgatagaatacaccggcggatctcattggaaagaggggtgaggggctggagctgttcaaacattccatccagagagtccggtgccttttcctcatcttcttttcgggtgtaggatttggcccggttggtattctccaggagagaacagatggcaaggagctctccggtgccaagggtgcctccgatttccagtcttttgagagagcctctgatatccttcacaccggcaaaagaaaggctgcctttctgatatatccggctaagggcgtcctgggtctcctcctgcatacgttctattgtaacaatatcatcctggggcaaaagggcctggcacaaacgtttcccctgggaagaggtggcgcaggcagtcagctgttcgatgatcttgttgtattctaatgtttttaatgcttttttgttcatgtatttgcctccaaggcggactgaatcaagtgtacatccgtctttttgtttttgtcattcttctagtagttattctaacctattatggagggaatgaaaagtgaaaagtcgatttcacgggagaaaactgaggaatttatggtatacttgggataataaaagaaaagagggatgaggatgaatgctgacagaatgctggaattgaccatggaactgctggagggtggaatgatgtccggggagataaaacctctctataagctttatgaagaactaagtccaaaagagaccgcagagttgattgattacacaatagacaatcagaagatggattcctgggacaagcaggttgtttacctgtatcttgccctgtattcttatcagataggggaatatcttccggataagctctatgcgcatctgatgaaagaaacgtgggattcctaccccgagatttttctcagagcagcccctcaggtagcggaaatgttaatagatgcagcccagacagatgagatgagagatcagataatcccattgctgagcgcagttaggtccgaaaaatcagctgagtttttagcaggcacagaccatagatgggaggatacggcaggaggatggtgtctggaaaagggaaaaataaaggagctgtaccgggaggaagtggtaccctttgaagagtctccgggaaccgaagaagacggctgggttcctctgcggcggatagaccggctgtgcggattctgccgccatcccctaacgctcatattcaatcagaaggagcccttgggaagctgtctggtatgttcctgttaccagacaatctataccaggatggagcaaggcgaaattgcctggcatgagcaaaacaggaaaacagaaattctggaacagtgtatggatcgtgtgttagatggatacccgaatccggaaagaaagctgaaaaggagcaaagagttcagaaggataacctattctgccagtattatgacggatatatcccatacacagctgggcggactgccctgcagatttgatcatctggattatccggactgccccgactgcggagaaaaaatgatttttgcaggacagatagagggacaggacatatgggaatggggagatggaatgtattatttttatgtatgtgagaattgtaacaatggtgcctgtaattatgaccagacgtaagccgtcgggagtgaaccccctaaaaaccaggtgtttatagatggtaccgcttctaaaagtaaatattttcccggattcttcataaaatgttcatatctctttgctaagataatttatattgtatactcgccgggattcctctttttggcatcccgggaacgggatttgcgtgtatcttacttaagcaataaaggagaacgtgcagtatggatgagaatgaaaagaaagaactcatggagaatcctgacaaggagcatctggaagaggcagaaaaggagagggagggagagactcctgaggagcatgaggaagcttacagctttgtaaaagagacgataaaagagaagcctctggacaggagaaccgtcctgagacgggcagggtggattgccggtgccgcagtgttattcggtgtaattgcagctcttgtattttcgattactatctccgggatagataagtaccgggaagacaaggaaagcgcacccaaagtgaatattcctcaggatgaagaaccctccggagaggaggacgaagagactccccccgaagaagagtctcaggtgccagtgcaggaaccagcagaatttactctggcagactattccaatctttacaaggatatggttcagcaggcccaggaacctaaaaaagctattgtaacagtaatcggcaataccagcgggacggactggtttaacaacccttcagaaagtcagaagcagatctcagggctgattgttgcgaataacggacaggatttatttgttctgacagaataccgtgtagtggataatgtagaccgcattcagattaccttttgcgacgggtcaactgtggatgcccgtttccagaaaacagactctaatacggggcttacggttctgaaggtgcctctgtcagagatttcccaggaatcccagaactgtctctcagtcgcgtcgctgggaagctcctacagtgtcagccagggagaacctgttattgcaattggaagcccgatggggtatagtgattctattgcgtatggtttaattacctcggtttccaacacggtaaatgtagtggacggcgagtataatctgctgacaacggatattatgggaagcagtgacggaagcgggattctggtgaatctaaacggggaagttgtgggagttatcgcccaatcttttggcctggaggacagcagaaatatagtaaccgctttggccatctctcagattaaggaactgattgaacagttgtccaataatacggataatccttatgccggaatccggggaatggatgtcacggatgagattgcggcgaatacaggaatgccaaaaggggtctttgtagatatgatagcagaggactctcccgctatgcaggctggtatacagaaggccgatgtgattactgcggtcaaggagaatgaggttgtgaccgtcaagcagtatcagaatgaacttaaaaaatgcagtgtaggcgagatgattaagataaaagtcatgcgcaaaggagcagaaggttatgtggaactggaattcgatgttaccctgactgcttcgtaaaaagacagaaagaattaggaaggcaaaaaagagaatgaaatttttaaatgaattgcgtgaaggtgaaaaggcaaatgggatttatctgtgcaagcacaagcagtcagcagtgacaaagaatggaaaaccttatgaaaatgtaatcctgcaggacaagacaggtaccatagatgccaagatctgggagccgaactctcaggggattgaagattttgacgtactggattatgtggacgtaatcggggatgtaacctgttttcagggaatgctgcagatgagtatcaaacgtgcgagaaaggcggcggagggggagtatgaccccggaaattatctgccggtgagcggtaaaagcattgatgacatgtaccaggagcttctccggtatattcagagcataaaaaacccttatttgcagactctcctgaacaaatattatgtagaggatactgcttttgtcaaaggatttaagggcaattcagctgctaaaacagtacatcacggatttgtaggcggccttttggagcatacgttaagcgttgtcaggctgtgcgaatactatataactgcatatcccattttaaacagagatttgcttctcaccgcggctatttgccatgacatgggaaagacaagagagctgtctccatttcctgccaatgactatacggatgacgggcagcttctgggccatatcatgataggagcagagatggttcacgatggggccagggcgattcccggattcccggaaaaactggaaagcgagctgaagcactgtattctggcacatcatggagaactggaatacggttcaccgaaaaaacctgcactggcagaggctgttgccctgaatatggcagataacacagatgccaagatggagacattggctgagatcttcagttctgcaaaggatcagaaggattggctgggatataaccggctgtttgaatctaacatacgcaagaccacttgcgaggaataaggcagtacatcagggaaggacggggacgtatatggacccgtcctttatagacgatacaggagacgaatatgaactataaaaagaatgacagtattacaattacaatagaggatatgggacacgggggagagggaatcggtaaaattgacggcttccccttttttgtcaaggatgctgtgataggagatactatagaagcaaaggtaataaaagcaaagaagaattacgcctatgcccggatgattagactccttcagccgtcgccccacagggtagaacccagatgcccctatgcccgccagtgcgggggatgccagattcaggctctctcctatgagcagcagctgaagtttaaagagaataaggtaaggaataaccttatgcggatcggaggtttttctgaggttcccattgaagaggtgatagggatggaggaaccgtatttctacagaaataaggctcagtttcctgtcggaaaggataaggacggcaatataatcgccggcttttatgccagccggacccacaccattatcaacaacagaaaatgtttcctcggagcagagatcaatgaggtaattctggacaagatcattgcctatatgacggagtggaacgtggagccctatgatgaagtgacaggtaagggcctggtacgccatgttctgattcgctatggattccagtccggcgagattatggtctgcctgatcgtaaatggggagactgtgccgaagtcagaaaagctggtgaacagtctgagagagctcgaaggaatgaccagtatttctttgaatgtaaacaaaaagcggacgaatgtaatccttggagaagagattaaagttctgtggggtcaggcctatatcacggattccatcggagatgttaagttccagatttcccctctgtccttttaccaggtaaatcccgtgcagacaaagaagctgtatgagagagcacttgcgtacgcacagctgacaggcagggagactgtgtgggacctgtactgcggaataggaaccatctccctctttctggcccggaaggcaaagcaggtatacggggtggagattgtccctcaggccatagaagacgccaagagaaatgcgcggttaaatgggatagaaaatgcggctttttatgtgggaaaggcagaggaggttctgcctgagaaatatgaaaaagacggaatctatgcggatgttatcgtggtggatcctccgagaaaaggctgtgaggaatccctgctgcgcactatggtggatatgaagcctaagaggattgtatatgtaagctgcgactcggcaaccctggcaagggatgtgaagtggctgggggagaatgggtatgagatggagagggtgacggtggtggatcagtttgggatgactgtccatgtggagacttgtgtgttgctacaaagacgaactatatagaaatccttaattttaggcactttttcaagcatatcgtctttacaagtgagggcgataaaatcagaaataaagagataaaaaactatatcaatgtttcagtagttgttgatatagagtgtgggaacacaacagaataagatttacaaagaagggtactggataaaaacagtatcccttcttgcgtttgggcgttcagaaatgagcgccctatttgttttagaaaaactttgtatagatggtcagtccaaaaagtaagatagaaataatgtaaacaggaacaaaagcaaatagttgtttttccttttcttcatacgtgttagacaacggaataagcttatatatttttaaaactgtatgctgaatccaaaataattggagtataaacaaaaacgaccaaccaattatgttaattgaataaagcgggttctgtatgttagtatttattttctccaaaagagaataatcaaccattgcaaaaccagcaatagcaaaaaaatctgctactatcttcaaagtaaaatatttcatactcattaggttagaaaatacagattgttgtttattccaaccacgtacaataaaaataatacacagtaataccaaaattatagataactgtagcattgtgttccgcatagggatataaaaaatggcagtgatatcagtaatagaatgaatagtattcctttttatgaaacttacaaaatttattgccatagatacataaatcaaaattatggcaaattgagttattcttttagatttccaacgtgcattttgtattgctacattatctaatttgtacattggagttgatgatacatttatatcatatttaggattgatttgttgaattatattattctgaatatattgcttcgtactattagaagattttttgcagaataattcataaattgtcaaaccaatagttattatattcaaacatattgaaatgatttccagcataagtttccctcctaatacgacattatatcacattttcccttagatgttcaaaagtgaacatctattttttttacctatttttttacaaaaagcgaaaggagcattgattatatgaaaaagattataaaccgtctgcttgctggcgtactaagtctggctgcggttctcacaaccttgcctgcttcacaggtacaggctgcggagaagcaatactggacggacgcacaggaaaaggcaggctatgtagaaaaggtcatgaatgacggcagcataggttctacattccatgagggaattatgaccgtggatggtgaaaccgcctactgcattgacatcaacaccgatttccagtctggctataaatcacgttctgacgcaagcacccgtatgagtgccgaccagatcgctgacgttgccctctcgctggaatacgtcaagcagtatgcagccagctacagggagctgaattataaacaggtctatctattggaacaatgtgttgtctggcagcggttaagcgtacatttaggatggaactgcgaccatgtacgtgctgcctacgacgaagtatccaaagcggtacaggacgaggtatacgctggcgcaagggcatttgtaaaagccaacaaaggacgctatgattgcggcggctatatctattccggcgacgggcaggaattaggacaattctgggcgaagctggatgtaggaaatgcggcacttcaaaaggtgtcctccaatccgggcattaccaatggaaacaacagctattcccttgctggtgcgacgtatggtgtctttgctgataaaggctgcaaggaacagcttgccacccttatgacagataaagacgggaacaccgaagcggtggaagtaaaggctggtaaagtctatatcaaagagctatccgttccggcggcaggttttcagttggacaagacagtatatccgttgactgtcaaagctggtgaaatagctaccttgaaagtcagtgatacgcccaaagtcacaaccacactgattgaacttttcaagattgatatggaaacacagaaagacaacccacaagggaacgcttctttagagggtgcagagtttacatggaaatattatgacggttactacaataaagacaatctccctgccgaagctaatcgtacatgggttacaaagacaatcgctgaaaaggacagcgacggtacaatccattatgttacaaaattggcggacgcatacaaagtgtctggcgacagcttctatatgcaggacggaaaagcggttcttcctttaggaacattaaccgttgaggaaacaaaagctccaaacggctacttattggacggtgcatatatgcaggctggcgacaagtccgaacagataaaaggcttatatgtaacacagattacagaggacggcgaccttgccgtattgacgggaagtaaccagttttatgtatcagataaagtcattcgtggcggtgtgaaaatccagaaacgagatttagaaacgagcgataccaaaccacaaggaagtgccacattgaaagatactgcctttgaaatcatttccttaaatgataattcagtattggttgagggcaagttatacaagaaaaatgaagtggtaaaaacaatccataccgatattgagggtatcgcttctacttctgctgatttgttaccttatggaaatttccgtattgaagaaagcaaaagtccagacggttacttgacagacggtgcaaaagcgattgacttctctatcacagaaaatggaaaaatcgtggatttaactgacgaagcccactctatctataaccagattaagcgtggcgatattgagggcgtaaaaatcggtgcaggcacacacaagcgtcttgctgatgttccctttaggatcacaagcaagacgacgggcgaaagtcatgttgtggtaactgatgataacggacagttctctacttcttctgactgggcttctcataagcacaataccaacgcaggaaaaaccagcgaggacggtgtatggtttggaacttctgaaccagacgacagcaaaggtgcgttgccttatgatacttacatcattgaagaattaagatgtgaaagcaataagggctttgagcttatcccaccatttgaaatcgtagtatcaagaaataaccgtgtgattgatttaggtacattgactgatgaatacgaaaaagaaatctctattcataccacagcaaccagcaaggacggcgaaaaggcaatccttgcaggaaaagaagttacaatcgttgatacggtcaaattggacgggcttgtaaaaggtacaaagtatcagttaaaaggctggcagatgttaaaagaagaaaatgcagagcttatcattgacgggaaacgtgtagaaaacgactatacatttgtagctgatgatgaagctatgaaagtggaaatcgcctatacattcaatgcgtctgctttaggtggcaagaaccttgttacctttgaggaattatacgatttaagcaatccagacgaaccagtgaaagttgccgaacataaagacattgaggacgacggacagacggttactatcaaagaagtaccagaaacgcccgaagaaccgaaagaaccagagaaaccagaaacaccacagacacccgatacaccaaagaaaacagacagtcccaaaacgggcgacagcaccaacctttacggactgcttgcattattactaacttctggtgctggactagcaggtatcttcttctataaacgccgtaaaacgaagaaatcataaggcggtaacggtatgatgaaagaaaaatcacgttctccgccgaagctgtcaaacggcagacttcctcttattctggattgtctgctacttgcctgcaagcacgcggatagtcaagggtgcgtaagcatttcgtttaccctttactatctgtgggattgctggtacttccttaactgccagaataagaaatcactatcaacaaacttatcaaaaatagaaagaagcgaggtaaaacactatggaaatgaaatatgtagtgccaaacatggcacagtcttttggaactcttgaatttgcaggcgaaagcgagcctatttttgaaagggataaaaataaccgcagagtcttagccagacgaagctataatctttattctgacgtacagaaaggcgaaaatgttgtggtggaaattcccgtgcaggctggcgaaaaacattttaagtatgaacagaaagtaaaacttgtcaatccaaagctatatggcagaggttacgcaatcggggatatgggacataccgattatgtgttgcttgctgatgatattgtagcagttgaagaaaagtaaaggagtgaagaaattatgagattatcaaacgggtttgtcattgacagagagaaaacatttggagaattaaaatttacagcggtgcgtgatgtgttcttgcagaatgaggacgggacaccgagtacccagcttaaaaagcgtatctatgatttgaagtgcagtctgcatggtggaattatccccgtgtctgtaccgccagaagtaccaataagggaatttccttacaatgcagttgtggaacttgtcaatcccgtagcagataccgtatcaagaaagacctatacgggtgcagatgtggactggtatgtaaaggcagaggatattgtgttgaagaataaaggcaatcagaacgcaggcaatccacagaacaacaatccgcagggacaaccgaaaaaatagacttgctaactagattttcattgtagaggttatagagaactgttataatatggatatgaagaaacgggcaaattagaagttaccgaaaggagtagataagattgaaaatgccagaaaaaattgatgtaagtatgtttgctccatgtggaatgaattgtaaagtttgttataagcactgttaccataaagaaccttgtgctgggtgtttgaatagtgataaagggaagcctgagcattgtcgtaaatgcaaaataaaggactgtatcaaagcaaaagcgttatcctattgttttgaatgtactgaatatccatgtaagttgattaaaaatcttgaaaaaagctataacaaacgatatcaagcaagtcttatagaaaatagccgatttgttcaagaacatgatttggagcatttcgtggaacaacagaaaataaaatatacttgttctaaatgtggtgggattatttctattcacgatagagaatgtagcgagtgtcaagaaaaaatgaaatagcaaaatcccagtttttagaattgtagaaatcggaagttaggagactaatattatgaaagggtttgaacgtaaaaatcaattattttctctttgcggattgaattgcggactatgccctatgcttttaggaaattactgtggcggttgtggtaatggtaatcaatcatgcaaaattgcgaaatgcagtcttgaacatggaaagattgaatattgctatgaatgcaaacaatacccatgtgaaaaatatcaacacattggtgactatgatatttttattacgagcagacgacaaaaagcagatttagaaagagcgaaaaacataggcattgagcaatataatcttgaacagcaggaaaaaatacaaattctttcttacttactttctaactataatgatgggcgcagaaaaaatttcttttgtgtggcagtcaatttattagaactttcagagatacaagaagcgataaaacaaatacaatccaatgataaattgtcctcattaccatttaagacacaatgtttgtatgtggtagaggtgtttcaaaagattgccgacagaagaaatataaaactaaaacttatcaagaagaagtagtttataaattccagtttgataacttcatatctatgcacacaaagcagttagtctatacgattgactgcttttttcatatccagaaaggagtgattgatttatgcgaatgatttggaataaaggacaccgtatcagagccagcgacaagcaccttgtctaccatttttccatagggacgcttctgtttgtattcgtggtggttcttttgctactgaatatgaaacagctcatgcgtaccgattgggagcatatcagcttgttagagaacggcttgacgctttccccttacaacttcataaccatactgatagcgactggtgtttgtgcattggtcgcttttctgtattaccgcttctgttacgatagtttcaagaagctcctgcaccgtcaaaagctggcaagaatggtgctggaaaacaagtggtatgaagccgacaccgttcaaaatgacggatttttcactgacctgcaaagcagatcaagggaaaaaatcgtctggtttccaaagatttactatcaaatggaaaagggactgcttcatatccgctgtgaaattacgctgggaaagtatcaagaccagcttttacggttagaggacaagctggaaagtggcttgtattgtgagctgaccgacaagaccttacatgacggttatatcgaatacactctgctttatgatatgattgcgaaccgcattaccattgatgaagtacgggcagaaaacggctgtcttagactgatgaaaaatcttgtgtgggaatatgacgcacttcctcacgccttgattgctggtggaacgggtggcggtaaaacttatttcctgctgacgctcattgaagctctactgcatactgacgctatcctctacattttagacccaaagaacagcgaccttgcggacttgggaacagtcatgggaaatgtatatcacacaaaagaagaaatgatagattgcgtcaatgccttttatgacggtatggtacaacgaagcgaagaaatgaagcgacacccaaactataagacgggcgaaaactacgcctatctggaactgccaccctgctttcttatctttgatgaatatgtggcattttttgaaatgctggggacaaaagaaagtgtgagtttacttagccagctaaagaaaatcgtcatgctgggacggcaagcaggatatttccttattgttgcctgccagcgtccagacgcaaaatatttctcggacggtatcagagataatttcaacttccgtgtgggattggggcgtatcagtgaattaggttacggtatgctgtttggttctgatgtgaagaaacagtttttccagaaacgtatcaaggggcgtggctattgtgatgtaggaacaagcgtcataagtgaattttacacgcctttagtaccgaaaggacatgattttttacagacaatcggcaggcttgcacaagaaagacaagtcatgccagaacaacaagaaaaggagtgaaagaataactatgggttatttacaaatgcaactaatgaatgaaacatcagaagcaattacaatcggtatttgcttaaacattgataaattttatgctgatttagactttaccgcaaatagcgactttgaaaaatgggacgaatatccttttgagcgtttccatgaaaaaatgagagaaattttagaggaaattgaaaacaaacagcaggaattaccgctgttattttctattcctttggacgaagaaatgtcattcttgaatgttacattttgctacaattttattgtcatggataaagccttgcttctgcatacacaacatgaatttgaacttgatagcgaagccttagaaatatgcagaaatgaagatatagactgtgttgtcttgtatcttggtatgaatactgttatgtaagttcatacagcaaggcaggacgggacggcgacgtgcgaagcgaaaggcgacggcacggactagccgttgctggtgtggcgttagccacgccagcagagaaacccctcggtatctaacagaggggtacgtttgcaaataggcaatagacaaaaaacataggaaacataaggcttttggcatggtttttttacaaaattcagttgtgaagtcgccttaaaaatcttcacactttacagattgggggtatggttctgaatgaagaacaatggataaaagaattacgggagaaacggattgcttatggtatctcacaaggcaggctggcggtggcttctggtatcacaagggaatatctcaacaagatagaaagcggaaaaatgaagccgtcaaaggaacttctggaaactctgcataaggaactgacaaggttcaatccagaagcaccgcttaccatgctgtttgattatgtgaaaattcgttttcccacgctggatatacagcacatcatcaaagatatattaaaactgaatatcaattatatgctccatgaagattatggacattacagctatacggagcattattctttaggggacatctttatctatacgtcggctgacgaagaaaaaggtgtccttttagagttaaaagggcgtggttgccgacagtttgaaagttacctgctggcacagcaaagaagctggtatgacttccttatggacgcacttgtagacggtggtgtgatgaagcgtatcgaccttgctatcaacgaccatacgggcattttggatattccagagcttgcggaaaaatgcaggaaacgggaatatatcggaaagtccaaaagttacaagttttatcagtcgggcgagcttatcaagcacagagaggacgacagggaatatatgggacgtacgctttatcttggttcgctgaaatcagatgtgtatttctgtatctatgaaaaagactatgagcagtacgtcaagttaggggcaccgctggaagaagcggatattatcaaccgttttgaaatacggcttcgcaatgaacgagcctattatgcagtacgagatttgctgacgtattatgacgcagagcagaccgccttttctatcatcaatcagtatgtgcggtttgttgatgaagaacccgacaagcgaaaaaatgactggaaactcaatgaccgctgggcttggtttatcggggataatcggcaaagtctgaagcttacaacaaaaccagaaccttacaccttagaccgtacattgcgttgggtacaaaggcaggtagcaccgaccttgaaaatgctgaaaaagattgataagggaaatggtacagactacatggaaactatcgaaaagcaggcaaccttgagtgaaaaacatgaaatgataatcaaacagcagacgacccctgcaaaagatttggtggaacgttaggagtgataaaaaatgtgggaattagtaaaagacttcctgctggtatctatgggaatgggtattggcgtagtattgatgtgtattttgagtgtcggcaaagaagctgactataaaatgaaacaattaaaagaaagcgaggataattaaatgaatttcgggcaaaatttgtatcaatggtttttaagcaacgcacagagcttagtgcttatggcaatcgtggtaatcggtatctatttagggtttaagcgtgagttttcaaagctaattggattttgggtagttgcccttattgctgtcggcttggtattcaatgccagcggtgtgaaagacgtactcttagagctgtttaacaagattatcggggcatagttcgaacgtaactcttttgtaaaatgctcaactaaatgatataatgccattagtacaatattacaaatttgagaggagaatgctaatggcaaataacacaaaaaattcgaagatgatgaaagtagtttattttgatgaaacagcagcaacagattatattactatacagaatggtggacaaattgattggacaagtacagaaaataaagaaagattagcaaaaatgattgctgaaattgatatgcaagctaaaggcggatttaatttattttcatttattaaagcttctgtatccggaaatgctaatacaaacattgatacaaacactagtaagttaattaaaagcactgtcacaaacactcttttgacagattatatttcaatagcaagtaaagataaaaatattcgtcaatttcataatgatggtgtttatgctccagaaaactctatttctatgtatagaatgtatagttcatacttaaatattgtacccaaagaacaaattccaatagaccttgaaggacttaataatgctcttcttggcgaacgtggatattatcaaatgcttttaaatagcgaaaaagagatatcttgtgttttgagatttaatataaatgcatttaagaatgattatagtttggctgatttatcaaaaatgaatttatcatattttggtgtgaaagtggggcaatgcacaaaagaacaactatctttagaaaaagaatttgaaataaaatcatctactaatgtacctaatgttaaagaaattgtaattggagaaacaagtaggtcttcgataaagcttttagatgtttatgatattgtgctggcaggggtgatgagtattgaataaagtaattatatactatggttcaaaggaaaaattcaatcaaattatcccaaaagaatatagaaatttaacggatttagtttatgaatctgataaagacggaaaaatcatgaaattggtgataccaactcaaagtggcgaatatccgaaagaagaaaaggaagagaaaatatttgtaaaaaactttgttattagttcagatgaatatgctggggttcgagaacatgttattacaaattttattaacttccttgctaagtttgacgtggaaaatttgtatattcagaatccaccacttcaaataagcgaacaaattattagattgtatccgaaagcagaagtgaaatatcaaaaatataaacaattaacaacttctcatttgcttaaaataaatgaagaatacgataataaaattataggacaggaagatgtcaaacttgaattattgcaagccctttttcctcttactatgaaatatagacaaaaacctgtagttttattgttttatggagaatctggaattggaaagacagaaacagcaaaatatttagctaaaattataggtgaaccgatatttagaaaacaattttcaatgtatcagaacaatcaatttgctacatatctatttggaggtgcacattacgaaaaaagttttgcaaaagatttattagatagaaaatctaatgtcttgctacttgatgaatttgataaagcacatccatctttccatagtgcattttatcaactttttgatgaaggtatttatgaagaccagaactattatctaacgctaaataaatccattataatatgtacttcaaattatacagatttaaaagatattgaagacaatttaggtagtgcaatttataatcgttttgataagattattcatttcaacgatttaagtgttgaatcaaaaatgagaattggacaaataacatttgaaaaatatgaaaaatatttcaactaccacttaaacgaagcaacaaagcaaagattggaagaatcatatacacaatgtgataacgtaagacagatacagcatattattgagaatacttttgcattatcaaccattttaagtagaataaagaaataaatatttattaccaagagaaaggcggtagaattatgaaaaaatatatttcattgtttttatgtttgatttgtattttaactttaactgcatgtgggaaaaagactgaccctatcacgttgcctaaagcagaaaacatattatctgttgatgtaacagttgcaggaaagacagaaaatcatttagataaattctggataagtaatatgctttccaatatttccaattccaaaccaactcgcaaggaaagtgtccaagatgtcccacaagttgaatgttatatcaaaactgacattcaatttaaaacaggtacagatacaagcacattatttgcctatgaagacaatggaaaatattatatcgaacagccttatcaaggtatctatgaaattggtagtaaacagtatgaacaactacaagaagcagaatagcttgatgtttgtgtagagtgacaaatttcagtttaacaactttatatggaacatttacaaagcagttagtcttaggattgactgcttttttcttacctaaaaatcagattggagtgatgaaatgaacgatatttttaaagatatgcaggcaaaagtcggctgtgcatatctttctgacctgctctcttacaagcgtaaggtgtggcaggaagtgaaacggctgaaccttgctgactatgaagaaagagagttagaagatttttcaaagtatgtgtttggtatggcataccagatcttaaaagatgtgatgaaacaacagaaaggacgtgaggaacaatgcaggaaacaagggtgctggtggaaacgagaggaacaactggcgaagaaacaacgtcgtactggttcgacctgccgatagatgttgccgagtttgaagaaaagttaggtgtcggtgcagaaagtcaagattaccgcattatcgaaaaggtgttgccttatgctgatgaagtccatgaacatacaagcgtgtaccagctcaatgaattagattttatgtaccgccagctttcaagcgatatgcaggaagaatatgtatcactacttacggtgtatgagaacttagaagcactttatatttgcaggaacgtgattaccgtttatcacgactgtaaaagcatgatagatgttgcaaggcaaaaactgatgaatgacccgacattcaagcatttatctgaggactgtcaagaatattactttgactttgaagcctacgcttctcacttgctggaaaacagacgctatcttataacggaacacagtatttttgaactgccagaataggaaatgaggtggtgtttatgattgatgatatggcggtttatattgctaatcttggcaaatacaatgagggctatttagtgggagcttggttcacttttcccattgacgaagaagatgtgaaagaaaaaattggcttgaatgaacagtatgaagaatacgcaatccatgataccgacaacttcccgattgcgattggcgagtatgtttccattgaagaactcaatgagatgtatgaaatgatagaggaacttcccgactatatcgtagattgtctggacgaatttatcagccactatgggacgctggaagaagtcgtggaacataaggacgatatttattattatcccgactgtgaaaccatgacagacgttgcctactactacatagacgaattgcaggcacttggggacattccacccagcttacagaactacgttgactatgaagcctacgggcgagatttggatatgggcggttgcttcattgaaacaagccgaggtatgtgcgagataccatattaacgctggaagatcagcaacaagcattgttgctactgacagcgtatttctcttttaagggacagtctgaaacatggctgtccttttctcatttagaacttacgaaatcccacaaggggatacctctatgccgtgagaaacacggcaggagcaaagaaaggagctgaaagaacttgaaaaagattaaaagttatacgggtatctggaatgtagaaaaagtcttgtatgcaatcaatgacattaacttaccctttcccgttacctttacacagattacatggtttgtgattacggaatttatcatcattctgtttggggatattcccccactttccatgattgagggagcatttctcaaatatttcggtattcccgttgctctcacttggtttatgtcgcagaaaacctttgacggaaagaagccgtacagctttttgaaatcacagataacctatgccctgcgacctaaaatcacttatgcaggaaaagccgtgaaactgcataagcagacgttccatgaaacaatcacggcagtaaggagtgtgaagtatgttcccgataaaatatattgacaacaaccttgtctggaacaaggacaatgaggtgttcgcctattatgagctgataccgtacaactattctttcttatccgcagaagaaaaatttattgtgcatgacagtttccgacagcttatcgcacagtcccgtgagggtaaaattcatgcgttgcagatttccacagaaagctccatacgaagtatgcaggagcagtcaaagaagttggttacggggaaacttcgtgaagtggcattagaaaagatagacgaacagaccgaagcgttggtatctatgattggggacaatcaagtagactaccgcttttttcttggttttaagctcatggttacggaagaacaacttaatctgaagaatattaaaaaatccgcttggctgacattcaaagagtttctccatgaagtgaaccacacattgatgaatgactttgtttccatgccagatgatgaaatcaaccgttacatgaaaatggaaaagctattagaaaataaaatttcccgtcgttttaaggtgcgacgcttggaaacaaacgactttgggtatcttatggaacatctttacggcagggacggtatcgcctatgaagattacgcataccagctaccaaagaagaaattgaagaaagaaactctgataaaatactatgaccttatccgtccgacaaggtgtgtcattgaggaaagccagcggtatttgcgattggaacatgagggcaaggaaagctatgtgtcctactttaccgtcaatgcgattgtcggggagctggattttccgtccagtgagattttttatttccagcaacagcaatttacctttcccgttgatacatccatgaatgtagaaatcgtagaaaatcgaaaggcattatccactgtccgcaacaaaaagaaagaattgaaagacttggataatcacgcctatcaagcaggaagtgaaacaagctctaacgtggtggacgctttagacagtgtggacgagctggaaacggatttagaccagaccaaagaaagcatgtataagctctcttatgtggtgcgtgtatcagctgatgatttggacgaattaaaacgccgttgtgatgaagtcaaagatttttatgatgatttgaatgtgaagctggtgcgtcctgctggggatatgctggggcttcactctgaatttttaccagccagcaaacgctatatcaatgactatgtacagtatgtaaaatctgacttcttagcagggcttggctttggagccacccagcagttaggcgaaacgtcgggtatctatatcggttattccgtagatacgggaagaaatgtgtatctgcaaccgtccttagcttcgcagggcgtgaaaggaactgtaacaaatgctcttgcttctgcttttgtcggttcgcttggtggtggaaaatcgttctgcaacaatcttctggtgtattattcggttctctttgggggacaagcggttattttagaccctaaaagtgagcgtggaaactggaaagaaacactcccagagattgcacatgaaatcaatatcgtaaaccttaccagccacaaggacaatgcaggacttcttgacccgttcgttattatgaagaatgtgaaagacgctgaaagtctggcaatcgacatactgacctttttaacggggatttcctctagggatggcgaaaaattccccgtgttaagaaaagcggttcgtgccgttacccaaagcgaaaaaagaggattgttacacgtcattgaggaattgagaaaggaagataccgctatctcacgcaatatcgcagaccatgtcgacagcttcacagactacgactttgcacatctgctgttttcagacggaacggtagaaaatgctatcagtctggataatcatcttaacatcattcaagtagcagaccttgtactgccagataagggtaccacttttgaagaatacacgaccattgaactattgtcggtgtctatgctcattgtcattagtacctttgcattagactttatccattcggacagaagcatttttaagattgtagatttggacgaagcgtgggcgttcttaaatgtggcacaaggcgaaacactttcaaacaagctggtgcgtgctggacgagctatgcaggctggcgtttattttgttacacaatcctctggcgacatatcaaaagaaagtctgaaaaacaatatcggcttaaagtttgctttccgttctactgacatcaacgagataaaacagaccttagaatttttcggtatcgacaaggacgacgaaaacaatcagaagcgacttcgtgatttggagaacggacaatgcttattgcaggatttatacggacgtgtcggtgtggtgcagatacacccagtctttgaagaactcttacacgcctttgataccagaccgcccgtacagagaaatgaggtggagtgatgaaagaaaggataaaaggtgcgttcacaaggaaaaagatattccatgagttaaaaatcactctctttgtcattggcataacgctggtgcttctctctctgcttgggacggtggctcatgcaacgggacttgtggacgacactatcaatgcagaaaatctgtattccaaatattcgctgtcaaactaccagcttgatttttatgtagataatagctggggctggcttccgtggaactggctggacggtatcggaaaatcggtacaatatgggctttactgcattactaattttgtctggactatcagcttgtatttgagtaatgcaacgggatatgtggtgcaggaagcctataagctggatttcattaacgacatggcagacagtattggaaaaagcatacaaaccctagcaggcgttaccgagaacggcttttcctctacgggattttatgtgggatttttactgctcattatcttggtggtgggaatgtatgttgcctatacgggacttatcaaacgggaaaccagcaaggcactacacgctgttatcaactttgttgtggtatttattctgtccgcttcgtttattgcctatgctcccgagtacattaagaaagtcaatgaattttcatcagagatcagcaccgcttctttggacttgggaacaaaaatcatgctccctaattctgacagtgagggcaaggacagcgtggacttgatacgggacagcttgttttccattcaagtacaacagccgtggctacttttgcaattcggcaacagcaacatagaagaaatcggggctgaccgtgtcgaagctctggtatcggctagtccagaggacgaggacggcgaaacaagagaggaagtcgtgaaaacagaaattgaggacaacgacaataacaatctgacgataccgcaagtcattaaccgcttgggtgtggtgttcttcctgctgttcttcaatcttggtatcacaatatttgtattcttgcttacgggtatgatgttgtttagccaaatactttttattatcttcgctatgtttctgcctatcagctttctactctccatgataccgagctatgaaagtatggcgaagcaggcaatcgtaagggtatttaataccataatgacacgggcaggaattaccctcattgtaacggtggcgtttagtatttccagtatgttttacaacatttccacagattatccgttctttatgatagcgttcttacagatagtgtgctttgcaggtatctacatgaagctgggcgacttaatgagtatgttcagcttaaacgctggcgacagtcaaagcatgggacgcaggatattccgcagaccgtatctgtttatgcgacatagggctaggcgtatggaacaccgtatcgcaagggcggtcagtgctggcggtattacgggcggtgtggctggtgcggtagctggaagtgccgttgctggtaagaggacggaaagaaaaaatacggcttctaaagaaaatcggggcaataccacttccagcatgggacagcgtgcaggctcaaaggtcggtgctgtcttagatacgaaaaataaagtcaaagacaaagcaaatgccgttaaagagaatgtcaaagatatgccgacacagaccgcttatgctgttcactccgcaaaggaaaaagcaaagtccagcgtgtccgactttaagcgtggcatggtgcaggaacagcagtccagacagacgggacgattggaaaagcaggaacagcatagacagaatatcgctgacaagcgtatggagcttcaaaaagcacaagaagcaaggcatagaaagacggacggatcagcgacaacgggagctacccgtccccatgagcgaccagccacagcttcaaccattccaaagccgagtgctgaaaaaatgcaggaagtcaaacgtcctgccacagcgaccacttcaaaagcaagtgggccagtcaagacaaatgttatcaaagagcgtccgttatcttctggtgcttctgataggaaagcgacccagtcggcacagccagcacataggcagaatgtagaaaaagtggtatcgcaggaaacacgccagaattacatcaaagaccgcaggacaaaggttcagcagacacagaccattcagaagaaccagcagaccacagagaagaaccgtaaccttgttacgaagaaaggacaaaagaaaaaatgaagctgaaacatatcgctattattggcagtctgtttcctatcctcttttctctggtgcttttctttggtgtcttgattagtgcggacagcgacgacgagaacagcaatttttcttctggcattacgggtatgaatttatccgcagaagtcttgaaacatcagccaacggtggaaaaatacgcaaaggaaaacggtatttccgagtatgtgaatgtgttgcttgcaatcattcaagtagaaagtggcggtacagccgaggacgttatgcagagttcggaaagtctgggactaccgcccaactcattagatacagaaagttccattaagcaggggtgtaaatattttgcgtccctgctttcttcatgtgaagtacaagggataaaagatttgaatgtagcgatacagtcctataactacggcggtgggtatgtgggatatgtggcagtaaaaggaaagaaacatacctttacccttgccgagaatttcgccagagaaaaatcaggcggtactaaagtaacttataccaacccgatagccgttgcgaaaaacgggggctggcgatattcctatggaaatatgttttatgtggagcttgtcaatcaatacttgactgtcgcacactttgacgacgcaacggtgcaggcgattatgaatgaagccctaaaatatcaaggctggaagtatgtatatggtggaagtaaccctaatacttcctttgattgtagcggactgacgcaatggtgctttggtaaggctggtatctcgttaccgagaaccgcacaaacacagtatgacgcaacacagcatatcccactctcgcaggcaaaggctggcgatttggtatttttccattccacttacaatgcaggaagttatgtaacacacgtaggtatctatgtaggaaacaatcagatgtatcatgctggcgaccctatcggatatgctgacttaaccagcagttattggcaggcacacttaatcggtgcaggcagaataaaacaatagaaagtgaggacttacaatttatgtttaagaagaaagagaaacacacaaaacccgtgaaagaaaaaagagtgcgtactatgaaagtaggtacacataagaaaacagtaatcgccctttgggtcgtgcttatcgcaagtgtgagctttggagtgtataagaattttacagcgattgatatgcacacggtacatgagaaagaaaccatacagctacgccttgatgataccaacgggatagaaaattttgtaaagaattttgcaaagtcttattatacttggaacaacagtaaggaagcaatcgaagcccgtactgcttctatcaatgggtatctgacaaaggaattgcaggcactaaatgttgataccataagaacagatattccgaccagctctgctgcccttgatgtattaatctgggacgttgcacagtctggaacggacgaatttatcgctacctacgaagtagatcagcagataaaagagggagaacagacaaccaatgtcaaagcgacttatacggtcaaagttcatgtcgataaaaacggcgatatggtaatcgtgcagaaccctactcttgcaccagaggtaaaaacatcagactatgagtcaaaagtacaagaagcagacgcaagcgtggacgctgatacggttaatgacgctaccgcatttttagaaacattctttaagctgtaccctacagcaacagataaagagcttgcctattatgtggctggcaatgtccttgaaccaatcggcagggactacctctattctgaattggtaaatccaatctttacagccaacggggacaatgtgaaagtaaaggttgcggtaaaattcattgacaatcagacaaaggcaacgcaggtatcgcagtttgaattgacactacataaagatagtaattggaagattgtagaataactaaaaggcttgcatttctatattgatttgcaagcctaaatttattatttatatttttggaaaattccagctaacaaggtatctaccgtttctgataattcaagcctaattttgtctggttcagaaaaagcatttcttaattgcaaagttgtataaccatgaattattcccgtaagcatatttaatatttcaaatgttttaccttgtttaaggttacatgattggataagagtagttaataatgaaagatagtcattaaaaatagttgttgtttcttctgttccatgccatcccgcccattgaattgtttcataaattccagggtgttcaatcatatagttcagatattcgatggaaactgactgaattgcttctttccctatttttccaacagcaacttttatcattctctcattcataatacgcataccattatgagcaacttctctaagtaaatcatctaaactttcaatatgattatataatgagggcgtttttatatttaatttatctgcaactgtttttagtgaaacaccgttaagtccatttttatctgctatatcagaagcagtttgaattactattttctttgaaacacgcataataatacttcctttctacctaattattgtaactaatacaaatagcttagtcaataatcataattgttctaatactaattagattgacaaaaactataacaagagttaatatactaatatagttagttttaacactaacatcactaatgaaagataggtggagattatggctgaaaaactttatatcgataaaatacctgctatcctatggggcgaaccatctaaaaaaatatgtatctacatacatggacaaggtggtaataaaaaagaagctgaatatttctcaaaaatagtgtgtaaatacggttggcaagttattagtattgacttgcctgaacatggcgaaagaatacatgaaaaagacaaatttaatccttggaatataattccagaactagaaatacttatggcttttattaaagataggtggtctaaaatatcattatatgcaaatagcataggagcatattttagcatattggcatataaaaacgaaacttttgattcttgcttttttgtatctccagttttagatatgaaacaactgattttagatatgatgtcatgggctaatgtgacaatgatacaattagaacaacaccaaaaaatagcaactgattttggacaaactctatcttgggaatatttgaaatacacttcagaaaatccaatcgaaaaatggtgtacacctaccgaaattttgtatagtaataaagatgagttaataaaatctgacactataattcggtttgttaatagttttaactgtggtttaaccatatatgatggtggagagcattggtttcatacagagaagcaattaaaagttttgcaaaattggattttagaaaagttttgcaataaggagagataatatgttaggactaaaaaaacgtgatattaaacgagcattgaaatatggtgcaaaggctggcggttcgtcgtatgctgatgttcgagctgatattgaatcaatgattgataaagctatgaacagcaccgacccagaggtgtaggcgaattataaaaggtattttggaaataaacgccctacgccagaagaatatatttacacaatcactaaaaaaataaagttttgagatagcaaattatacttacgaggctggtggttttattggttgaaaatcaattatgggttttgtgtcctatatgtggcagtaagacacgaataaaaattcgcaaagatactgagttgataaattttccattgttttgtccgaagtgtaaacatgaaagtttaatcaacataaaaaatggaattataacaattatcaaagagccagatgcaaagacgcagagccgataatttgtaggttattttaacttatagattgtcggttcttatttgttacctgcgaagcagatcagcaaataagagtaaagagcttgtctattttgtggctgacaatgtatttgtatccctttttatattgaagtataaataatcaataattataattaggtacatgaatggagggatataatgttcaaaattggtgagttttcaaaactgacacaagtttctactcgtatgttgcgttattatgatgaaatggggttgctaaaacctgcgaaaatcgattcattgactggttatcgtatgtattcagcagaacaaatctcaactttaaatagaattatatatttacgtgatagtggcttcaacgtcgctgaaattgcattatctctcgattacagtaataatgacattatagaacagcttgataaaaagtctgttgaaattatggataatatacaaaaagaacaagaaaaattgaagaaaattgagattgcaaaaaaagaattgttacatggtaaaagtgaattgtattttaacataaccataaaagagataccgagttattgcgttttatctttgagaaaagaaataccaaattattattatgagggcgaactctggaaagaactttctgcttttgctaaagaaaataaaataaatatttctgatgaaacattctcaatatatcacaatgaggaatataaagaaaaagacgttgatgtagaattatgtgccattgtaaatgaaataggaaaaggagctggtaattttaagtttcgttttactgaaccagttcctatgatggcttgtactatggtatatggagatttttctaatatttcttatgcttatcgttcatttgctaaatggcttcaagaaaacagtcaatataagatgaaaggttcaagccgtcaaatagttcatcgcggaccatggaatgagaaaaatccgaagaactatctaactgaactccaaatccctttagaaaatctcttgtaaaaaatgataaaaaatgatattctgccttgactttaacacggtgttaaggtttatcgtttatttatcaagaagaaaacggaggaaaatataatgacaacttataaagtgaattcaataggtactatctacaacaatgaaaaaggtgctttcattcaactagaagcaccatatattccagcattaaaggaattagacggattcagtcatatcaatgttttatggtggttcagcgattttgacaatgatgatttcagaagtgtattggaaacagaacagccttataaaaaagctccagagaaaatgggaatttttgcaacaaggtcgccagtacgcccaaatccgattgctttatcagcagtagaaattatccatattgattatgtgagtgggctgatacaaattgcttatattgacgctaatgacaaaacgcctatcttggatattaaaccatacacgccgagtttggatagagtggaaaatccgcaagttccagattggtgtagtcattggcctcacagcttagaagagtctgctttttttgcatgggaaaacgaatttaatttttaaggagtgatgaaccatgagtttgcaggattacatttttgaaaaaccagtcattgaaacagaacatcttattttaagaataatgaataaaaatgatatagatgatttgaaagaatggattagtgatatttctttatacgagtattgggggaaatgtccttcaaaaagcgaaaaaaatccagaattactctttaataagccagaaaaagctactaaaagttttcattggggaattgtccataaaaaagaaaataaagtgattagtgaaatatggatataccttattgaaaataatagaatggcaaaagtggctttcagactttctaagcaatatcaaggtaatggactaatgagtgaagcgttaaaaagcgtaattgaattttgtttttcaaaaacagaattacaaaaaatatggacagatgtgcatattttaaatcatgcttcttacaagacattggagaaagtcggttttcaaagggaaggacatattcgagggggaaaaatggtaaatacctattgcgactactacctatatggaattttaaaatctgattatatcactagctgatgttatggctaatattgaagcgacgattggcaaagcaatgaacaatacagttccaaaggtctatgatacgaaaagcattaaaagatatgtgatgaatttattagatatggctcattaaaaagtaccaaagaaataaaagttaccatatagacaaaattggttttttatatcttttgatttcttataagataatggcattgtgcgacaagctatacaaaaaattttcatgtatactttgattataaattatacaaggaggtactgatatgtacgcatatgaaaatattgaaatgtcattaaactatattgaacaacatttaagtgagaaaatcgaaacagagaaactggcggaaattgcctgtctttctacattttattaccaacgcttgtttaaaaagttagttaagaaatcagttcaagagtatatcaaacttcgccgtttagcaatggtaatagcagaattgaataattcagaggaaagaatattagacatagctttaaaatatggattttcagaccatgctaacttcacaagagcatttaaagaagtttaccatattactcccgatgaatacagaaagaatgttcctatgttaaatacatttgacaagccagaactttcttcacgttatatcatgattgatgaaaatgtcccattgattgtaggaaatattgttttggaaattcaaagaaaaacattaagaacaaaggaaacatattttggttttgaaaaaacagtaaatattgctgaacaaattcctgctggagaaagtacaggaattgatgttccaggtcagctatggcgcgaattccatgcaaagaaactgcaaactgaaaatgccatttttaacaatgatattgaacttggtgtatctcacttagcaagtccagataaaggaacattcctttactttgcaggaggtatggtttcatcaacagatgtatgtcctaaaaatatggtacaacgtacattaccagcaggtgagtatattgtatgcaaaattgaggcagaatcttttgaagaacttgttactgctgctttaaatcaagcaaataagtatctgtttgaaacttggcttccaaatcataatttggttacaaagccattcatggcagaaaaatattacaaaggaaatgcagagattaattatatggaaatatgggtaattcctgtgtaaacagtaaatgctaaataggaattatttgacgcaatgaaaatgaaatagaaagcttataaaggaggacatagtccgttttgataaacataagagatataaattatgtacctaatattagtgaaataagcgtttatattgaaaactctgcatttgatgagttgtatcagcatatgaacaatgaatataaagcagtttgcaaaatcgaatacagtaaagatgtctgggcacgaggttggaatgtaaagtttaaaaaatctgggaaatcattgtgtgttgtctatccgaagaagaactactttactgtgttggtggttgtaggtaataaagagaaagaagatgttgaaaacttgttacctaggctttctgaatatgtacaggaaatttatcgtaacactagagagggaaatgaacaaagatggcttatgatagatttaaaatctaaaaataatgtatatcaagatatattaaggcttattgaaattcgttatgctataaaatgatgtttttagatacttaagaaagtaccttaaggaggctaacgttatggaaaattttaagtacaattctacaaaatcaaatacaatctaataaagctttactaaaaattgaatgcaatacagctttaaaggctcgtacaaactatatgttttgtgcgggcttttttaatgcaaaaaaaattttttcaattttttggggtttcaacttaacaaatcacacctgccattccctatatggtgcggaaagagagataaccacttttcaagtcatagcaggaaagggggtgagattatgaaaccgtctgacttccagaaaacagttcaatgccgttttgaaagttgtttgaagaaagttgtccgtcatattgttaaagactaccagcaaggaatgaaacgacgaaaagagaaagaagtttcgttttgcgagcttccagaaattgttgttgaaaagctggctgtctgggacgactacgaaacagactattcagttttcaatgtatgcggtaatgatattcgtgtctatgatgatgaattggcagaagccttaaaacagttgtccgagcgtaaccgtgaaactttgctaatgtattattttttggaaatgaacaatgaagaaattgcaaaaaagcagaatatttccagaagcggagtatttcaaaatcggcataactcattggcactcatgaaaaaattactaaaggagaaatgatagcaaatgatacacacatttaagaagccgtcctactacttgctttcgcaggctatggacggggacgaaaaagcgattgaaaaggtacttgcattttatgacccatacatatcaaagtgctgtctgcgtccactcattgatgaatatggtaatgtttatatcgttgtagatatggaattaaaaggacttgtccgagaagcacttatcaaaatgattttagggtttgatattgccttagaaattgaagaagaataacaagcagtaatcgcagagcatgatttgttcaatcccctctttcctgctctgcaccctgcttttacatgaaagcataccgctttcgccacagctctttgaaaactgaataaagcagacagatacgtttgtgaggatagagagccacgggaactgtacgccacgacctttttaaaagaaagcgagcgatccatgcagtgatccgagagcgaccgtcggaaaagtcgttttgccatgacctatcattacagaataatgatacttccgcatggtgcggttctgcccacaagaatgggaatagttgagatactaatggagctttccaaagccgtctgtctgcttagaaattaaaagcaagggggaattgatatggagaaaaaactaatacgatatagtatgcagattgccatgttgaatcagcttcttgcccgtaaaatgatttctgagaaagaatatgctttagtaaagtcaaaacttatgcaagattataaaattgtttcagatataaccgcttgaattgtgtgttttttgtattgtataatgacactacaaaaggaatacaaaacgtgaatataaaaggagtggttttgtgaaagaagtagaagtaatcaaagcaaggaatgacttacaaactcgtacaagaggaaagacgattgaacttatgcgagttggtgcatattgcagggttagtacagatagtgcagaccagctaaacagttataaatcgcaggtagcttattatacagatatgattaaaaagaataaagagtgggtacttgcggacatatatgctgatgaagcaatcacaggtacacaagtgacaaaaagagaagatttccagcgtatgataaatgattgtatgaatggggaaattgatatggttattacgaagtctatttccagatttgccagaaatacgctagatacgttaaaatatgttcgtatgctaaaggaacgaaatatagctgtctattttgaagatgagaaaatcaatactttaactatggacggagaattgcttttagttgtacttagttctgtggcacagcaggaagttgaaaatatatctgctaatgtaaaaaaaggtttgaaaatgaagatgaaacggggagagctggttggctttcaaggttgccttggatatgattatcacaaagacacgaaaacaattactgtgaatgaggaagaagcagaaattgtacgttatatttttaatcggtatattgagggagctggcggttctgttattgcacatgaacttgaaaatttaggatataaaacaaagtacggaagttctacatgggtacagtcaacggtcattggtattatcaagaatgagaaatataagggcgatttattgctggggaaaacatttacagttgacccgatttcaaagcggagattggagaatttcggagaagaagataaattctacattcgcaatcatcatgaaccgattattagtgaagaagtttttgaaaaagcacaagaaattctttccagaagaaatgtaaatagaggaaagattggagagggtaacacaaagagagaaaaatatagtagaaaatatgctttcagttgtatgctggaatgtggattttgtggcggtactttaacaaggcgtaattggcacagcagttcacaatacagcaaggttatatggcaatgtgtaactgctacgaagaaaggaaagaaattctgcaaacatagcaaaggtattccagaaacagctattgaagaagcatttgtagaaagttatcgtttgttatgtgacgataataaagatgttctggaagaatttttgcagagaatggacgatacccttagtagtagtgtggtgtcaaaacaacttgcaaaagcagaaaaggagatagacgcattagaaaagaaaaagagtaaacttgtggatatgcgtttagaagaaattattgataaggaaacctacgaaagcaaatatgccgatttagtaagcaaacaagaacagcttgtcgaagaaagaaaaaaattacaagaaacttctgataatgagaaagacatcaaaaaacgtctgaaagagtttaagaaaactctggaacagaatgaagttcttgataaatttgaccgctatgtgtttgaaagtattgttgaaaaagtaattgtaggtggacttgatgaaaatggaaatgttgaccctgcacagttgacgtttgtttataaaacggacttgaagaatagtgtagatggtgctaaatttaaaccacaaagaaaaaatgcaagaggacgacataggactgctgaattgtgttcacatgacagcaacgaggttgataaaatgtgttccgatagtagtaacgacacatgttgaaaccgccgtgcttctcgtgcggaaaccttgattctaggcgggtttgcgggattatttggggaaaatggggttgtgtttttaaaggaatagagatggataagtttccttcttggtggggacggggataacgccagatagtttaaaaatgagggggttgctatgtaaattaaactatgtagcaaaaccatactattgtaaaatagttaaatattatgataaatttatagattggaatttgaggtgatagaatgttggaggcaattacctaccagaatatgttaagagatattaacagcaatgaaattaaggaagatactattggaatattgattacacgtcccgatttagaagttgggaaaagtattttaaatagcttgaattattttcatcatcttagtggaaataatacaaatttttatttgcctggatatggagcatactggtataaaagttatccagacggacaagtagtaaccaaaattgagggtgttgactggtcttttagcgataaaatgtttgtctgttttataaatgatttagagacgtatagtaagtgggaatattcaggtgaaagtgaattgctcatgttggaatataaaaatggcatactatcttatgataatatgatgcaattctatttagataatatgatgcgggatagggttatcgtttcaattccttcattttttcaacagctacttagaatctgtaaaaatgataaatcattaaaagacattagtaacgcatttggaaaggataaattaatccaagtaactaaagaaaatattttaaataacattccatcaagtctggcaaatgtatttgtgcaggaaaaatatttctgtattcgaaattgtggtaaatgagttgtatgcaattttaggaggaatcaaatggaacatcaattttatgaacaaattaaaagaattctttctgaagccagaaacaaagtatatcaaacagcaaactttgcaatggtggaagcgtactggaatataggaaaaagtatcgtggaacagcaggatggatatgaaaaagcagaatatgggagtagattaatagcggaattatccaaacaaatgactgtagattttggtaaaggtttcacaccgactaatcttaaatacatgagacagttttatctgacatttccaaatagtcacgcactgcgtggcgaattgagttggacacattatcgcctgcttatgcgcgtggaaaataaaaatgcacgtgaattctatatagaagaagcaataaaatcaaattggagcacacggcagttggaaaggcaaattaattctttcttttatgaaagattgctatccagtcagaataaagaaaaggtttcggaagaaatccagaaaatggagcctgtaaaaattccagaggatattatacgcgatccatatgtattagagtttctgggattaagtccgaatgatgatttttatgagagcgaccttgaagaagcattgataacacatttgcagaaattcctcttagagttggggagagggttttcttttgttgccagacaaaaaaggattacatttgatggccggcatttccgaatagatcttgtgttttataattacattttgaaatgctttgtattaattgatttaaaaattggagatttgacacaccaggatttagggcaaatgcagatgtatgtacattactacgaacgtgaattgatgaatgatggagatagtccaccgataggaattgttctttgtgcggataaaagtgaatctatagtaaagtataccttaccagaaaatgaaacgcagatttttgcgtcaaagtataagttataccttccaagcgaagaagaactgtcgcgggaattgcaaagggagtacagggcattggaatatgacaaagaaaaattaaattaactttacttaaagaaagtataattttggtgggaggggtagatatattcataaaggggtgaatttcgttcaaaaggggtaagaggggtaaaattgacaaagaaatttactccaccactatgtaatgaaaatacttttgtcatgtagtataaaatatccgtcccaccgcactgcgagtccattgtcctgttgcagcggaaaggtgattcagtcaaaatcggtgcatgattttaagacctgttcctgcggtgcttgcagcgtggatggtggattggaatatctgcgaagagtagcagatggcgaggaaagttatgcagaattatcgataacagaggaaatcactgatacaaaatagtatagaggaaatgcagacgtaagggcgaagatgcttttacgtcttttttcttatggggaggtgggaatgctttgtgaagaaaatccgattaatacctgttccgcccaaagaaccaaaacgattgagggtagcggcctatttgtcgtgttagtacaaggagtaaggaacagagagccagtctgttccgacaaatatgggcatatatgaatcagatattgaatcatccggattggaaatttgccagaatcttttatgattttggaaaaagcggattacggaaaaaagggcgtacagggttagaaaagatgctaaaacaggcggacgttggggaggtagattacatactcaccaaatcggtgagcagagtgtcaagatacactttggaaattctaaacatagttagatatttaaaggaaaggggtatttctatgtattttgaaaatgaaaagctggattctatgaatcccgaagctgaggcttatattacactggcgggtgcggtggcgcaagaggagagcagaaatatgagtgagaatatgaaatgggcgattacaagaaactttgaacaggggatttttacaaattataaggcatttatggggtatcggtgtgtagatggggagttggagattgtttcagaacaggcagaggtagtgaaacaaatatttgatttatatctggcggggtatacctttgcacagattaagaaggagctggaaaaacagaagataaagacggcaacaggaaaggaaagctgggatgtcacgactattcagaaaatgttgaaaaatgaaaaatataaaggggatgcattgttgcaaaagacttgataattaaatgtcagtaatacatcaaatctatagaagatgtatgatgagtgataattattacccggcaattgggattgccaggtaagactcgaaagaattagctcgtaactaaaccattcgataaaatgattttatataatttttgtcaaatggtcaaccactttcgggagaatcacatactggaaaggagtatgatggaaataaggtgtctattatcatctatcttttttagaaaaacagtagtaaaataaaaggagagatagaccatgataagttatttaaatttggacacaaaagggaacccaaataatgacaatgaggctcatcgtggataaaacatcatatggaggagatgctatgattgcccatatcaatgcggaaacaagagcagaacagaccgtcctgtcccatttacaggggacagctgcgttgtcagaaaagctcgcctgtcccctcggtatgggcaatcttgcatacttaaccgggctgcttcacgacttggggaaatggcggaaaaaattcgaggattacatccgtacagccatagaccacccggaaaaggttcggaaaggcgaggtgaaccacagctctgctggtgccatttatgtgtatcagcgatactacaaaggcgataagctgcagaggctgacggcgcagttgatggctgaagccattctttcccaccatggcttgaatgactgccttagcccacagggagatgaagcattccgaacccgtatcgagaagttggaagatttggattatgatgaaattctggtaaatcttgagaaaagtgggataaaggcagaggaactggatgatcggtttgcaaaagcgcaggaagagattgcagtattcatccggaaaacgtcgggatatgattatggaaaaagcttctttcaggggatgatagagcgaatgctcctgtcgattttgattgatgctgaccggacagataccgcagtgttttgcggcacgcgggatgagcttgctagggagtttacggactgggagctgctttgcagaaagatggaaggatatcttgcccagccaaagtttatgcaagacactcatatctcgcgaatccgccgggatatcgccgatgagtgcctgcggtttgcggagaatcaaaccgggatatatcgcctttcggtcccaaccggaggcggaaagactttaagcggtttacggctggcattgaaccatatcgccgggacgcggcgcgagaggtttgggaaaatagagaactcggagattcagaagaatctggagaaaccggagaatccggcaccgaccgcaaaaaagagaattttttacataggaccttacctgagtattttggagcagaatgcccaggtattccgggatgtgcttggggatggagattttttactggagcaccattccaacgtggttcaggatgatgaatcccagttggaggggagccgatatcggcagatgacggaaaactgggaagtgccgattgtgttgaccacatttgtccagtttttaaataccttgttttcagacagtacccagtctgtgcggagatttcatagtctggcagattcgattatcattatagatgagattcagtcgctgcccattcatatgatttgtatgttcaatctgatgatgaattacttgtccgctgtctggaatgtgacggtgattctttgctcggctacacagccggtcttacatcatgtgaaaccaccgattgatttggggcgtccggaagatgtgatcgaaaatacagcgaagctgtacgccagtctgaagcgcgtgagaatcgaggaaaagaaggggtggttggacacttcgcagctttcccggtttgtggcggacattgcagggcgggaacggtcggtactggcgattttaaatactaaggcagcggtgcgggcattatttcttgaattaaagcaatattatgctgacagcagtaaaccggttcgcattgtctatcttaccaccaacatgtgtccggaacatcgcctgaaggtaattcatgatttaaagcagcagttagaagcaattcaggaaggttcgacaaacgagcgaatgatttgcgtaagcacttccttgattgaagctggtgtggatttgtctttttgcagtgtaattcgttcttatgcggggatggacaacgttgcacaggcagcaggacgatgcaaccggaacggagagtcggaggaaggcgttgtctatctggttcggtacaaagaagagaatatgagccatcagaaacaggttgtgaaaggcgcttcctgcagtgaaaagctggtggaggattttcagcagaatccgcagcgttatgaccatgatttgctgtctccacaggcgctgaatacgtactacaaccattattattacgacccggaacaacaaaagctgatgcgttatcccatagaaaagaagggctttacgctgctggatttgctaagcgaaaacagggtcgggaaaatggcggcatacagggataaacgtcaggttgaactggaactttgtcaggcatttaaaacggccggggcttgctttcaggccattgacagtgatacggtaagcattctggttccttatgaaaagggaagggaatacattgcagatttatgcagtttccacagcacaccggctgaatgtaagaagattcttcgaaaggcgcagcgatttacggtgaatttataccgttatcagtttgagaaaatgaaaaatctggaggcactgcagttcctggaaaaagcaggtgcatgggcgctgaaggaaggattttatgacgaggagatgggagtggtaatggagaaaaagcttgattttatggacatataaggagggattacatggagaaagaaaacagcattacatttaaggtgtatggaatcagggcactgttctctgacccggtcaccagagcaggaggtgagaaattttcttatcaagtgccgacctatcaggccctgaaaggaatcaccgaaagcatttactggaagcctaccctggtgtgggtaatcgaccgggtgcgggtgatgaagcctatacagacggagtcacaggcggttcgtcccattgactataccggtgggaataccttgtctatctatacctatgtgcgggatgtggaatatcatgtgcaggcgcattttgagtggaatgagaaccgtccggagctggcccatgaccgcaatgaaaacaagcattttttcattgcgaagcgaatggtggaccggggcggacgcagggatattttccttggaaccagagaatgccaggggtatgtggagccatgtgaatttatggaagagaagggattttatgatgagattccagaactttcctttggaaccatggtgcatggcctgacctatcccgatgaagcggttcgggaggaggaacgggggaaattgacggcgagattctggcggccggttatgaaaaacggaattattgattttgttcgtccggaggcgtgtgagattcgaagaaccctgcgggatatgtctatgaatcattttgatgaccacaacagccagggggtggaggatctggaagaactgtttttgcaggaaggggtgaagtgatttgggattgctgcaggatttgtatgagacctatgacaagtcggctcatctcgtgggaaaggaggacgagtttgggaaaatccttcttcccattgcccattccacgcagaatgcacagattgaggtggggattgatttaaacggagcctacaagggcgcacggcgggtggagaaagcccgggcggtgaccattattccggtgacggaggattccggaagccgttccagcgggattgcgccccatccattgtgtgataagctgatttatgttgctggagattatgcccggtttgtgccgggaaaaaagacacagcaatattacgatgcctatattgcacagttaaaggagtggaaggaacatggctgccatccgtatgtggaagcagtttatcagtatctgagcaagggaacattgatgcagaatttgatatccgaagggattttggaggtggatgaaggcaggaagccggtgcccaatgcgaagattgaaggtattgcccagacagatgcttttgtgcggttttgcatcaatgatatcaatgtgatgggaaccggtgaaatcttcaaggagaaagcggtttatgatgattacattcaatattatctgagtattcagggagagcgggatattgattatatcaacggagaatataccatgtgctcggaaaaacagccctccaaaatccgccacagcgcagataaggcgaagctgatatcggccaatgacagcagcgggtttacgtatcgcggacgttttacaggcaaaaaagaggccatgtcaatcgggtatgagacatcccagaaagctcacaatgcactgaaatggctgattgaacggcaggcctataaccggtatggtttgtgtattctggtgtggaatccggtgctgctggatgtgccggactggatgttggatacggcggatttgttgtacgaggacagtgatgtcccggcgatggttgaccaggaatatgcccttcgtgtgcgggaggcgatatccggaaagtatgcagatattaaaacaaaggatacagatatcagcatattgtccctggacgcggcaacaccgggacgtatgggaattcgattgtatcagaagattgcaggttctgtgtttctggaacggctggagtcctggcatgcggagtgcagctggcggatgacttataaaaagggaataaagtctgtgattatggcaccgtctccggaggatattgctagagcggcttatggagtggagcggaatggacttttggagttggatgcaaagcgcatgggagatgtggttgagtccttgattccatgcatcaccggtgagaaaaagataccggtggggattgtgcgggcagcagttcagagagcctttgaaccgcagaaattcagcgattataattaccggaaggtcttggaggtgacctgtgcattgctgcacagacaaatgatatacaaagaaggagaggggcgaaatgttatggcacttgaccgaaacagaacagtgagggactatctttatggccggctgatggcagtgggacataaggtggagtatgatacgttttctgagagtgaaagaggaaaacgagaaacaaatgtgacacggtttatgagccagattgtgaagcggccgcagcagacctgggagctgattagcctgaaattgctgccttataagagcaaactaaatccgggactgcagaccaaataccagaaggaagagcaggagatatacgatttatttttggcagatgagtattcagatccgaggccgctgggggcggaatttttgctgggttatgcttgtgagttaagctatttatggggaacaaatgagagtaaggaaagcgagaaggaggactaaatgatgagtacttttacaaacaaaatcgattttgcagtgctggtgacggtaaacaaggccaatcccaacggagacccgttaaacggaaatcgcccgcgtgaggattttgacggcagaggtgagatttcggatgtgtgcattaagcggaaaatccgcaaccgtctgcaggatatgggggaagagatttttgtgcagtcggacggccattacacggatgaatacagaagcttaagcgaccgggcaaagaattgtaaggagctggaggcagcgcagaaggcaaaggatatgggagcctacgcaaaggctgcctgtgaaaaatggattgatgtgagaagttttgggcaggtgtttgcatttaagggagcggacagcggagtgtcggttggcgtgcggggcccggtttccattcatccggcttttagtgtatccccggtggatattatggatcagcagattacaaagagtaccaacagcgagccaaccaaggatggcaagcgttcttctgatactatgggtatgaagcaccgcgtagagttcggtttgtacgtatttaagggaagtatcaatcaccagttggcggaaaagactggattttccgatgaagatgcagaaatgattaagcaggcgctgattacgttgtttgaaaatgactgttcttcggcgcgcccggacggcagtatggaggtggtgaaggtatactggtggaagcataattgtcccatgggacagtattcttctgcgaaggttcaccgtactttgaagattgaggaaaaaaaatcggcgaacggcatgcccggctgctttgaggactatgaggtaactcttcagtctttggaaggtctggagccggaaatctatgatggaatatgatgaaaatgatttcctgatgctgtctggaatccaacattatgcgttctgtcccagacagtgggcattgattcatattgaacagcagtgggaggagaattatttcaccattgatgggatgattatgcatgaaaatgcccacaatcaggagaaaacagagaagcggaaaaatcttctgattaccagaggcatgccgatcttttcaaggacgctggggatccgaggtgtgtgtgatgtggtggaatttcatcggaatgagcaaggggtgacgctgcaaaattatgcaggattgtatctgcctgtgccggtggaatataagcggggaaagccgaaaacccacgatgcagatgagctgcagctgtgtgcccaggccatgtgtctggaggaaatgctgctgtgtgaaatccccaaagggtatttgtattatggggagccgaagaagcggcaggaggttatgtttgacgaggaactgcggcaaaaagtcattgcttcttttacaaagatgcatgagctttttgataagcagtacacgcctcgtgtgaaacagacgaaagcgtgcagatcctgttccatggcagatgtgtgccttcccggattaaataaaacgttttcggtggagcgttatttcgagaaggccatgaaggagggagagtagatgaagaaattactgaacaccctttatgtgacgtctcccgatgcctatctttctctggatggggaaaatgtggtgattctgaaaggggacggcggcaaggtgcgcattcccctgcacaatctggaaggagttgtagcatttggatacacaggagccagcccagctttgatgggagcctgtgcccaacggaatatttccctggtgtttctcacgcaaaacggcagatttcttgcaagagttgtgggggagacgaaaggaaatgtggttctgcgcaggcagcagtaccggatggtagaccaggaaactatgaggctggcgatttcgaaaaactgcctgacagggaagatttataatagcagaagcgtcataaatcgagtgctgcgagatcatccccagagagtggatacagagaaattccagatggtttccgaccagctgaacaacagcctttcccttatcagaaatgctatcggagttgatgaactaagggggtatgagggggaggcggcagcaagatatttttctgtatttgacggattgattttgcagcaaaaggacggattttctttttccgggcgaacaaagagaccgcctctggacaacgtaaatgccatgctttccttcgtgtatacactgcttacccgggagaccgctgcggcgttggagacggtgggattggattcctacgttggttttctgcacacagacaggccgggaagagtgtcgcttgccctggatatgattgaggagctgcgccccatttttgcagaccgtttcgtcctgtccctgattaataaaaaggtggtagatgcaggagactttgaaaagcaggaaaatggtgcggtctacatgtctgatgaggccagaaagaaaattctaagtctgtggcaggagcggaaacaagagaaaatcaagcatccctatctgggagaaacggtggaatggggactggttcccttcgtccaggcaatgcttctggcccggtttatacggggagacctggacggttatccgccatttatgtggaagtaggtgataaggtgctggtactgattacatatgacgtgaatacagaggatgcaagcggaaaagccaggctccgcaaggtggcaaagcagtgcacaaattatggtcagcgggttcagaactcggtgtttgaatgtgtgatggactacggaaaatgcagagaggtgaagcatattctggaggagattattgataaggataaggacagcctgcgcttttattatctgggaaataattaccagggaaagatagaacatattggcgcaaaggaaacgttttccgtagaggccccgctgattatctgatgagtgcctgttggttgtctgatcgtagtgggattcacgaagtgcgaatgtgagttgcacatgatttctttgggggattcgcactgggttttggggtgttttgggggttgaaaaagggtgattttgaagttttaaaatcgttttttgtaaaaatatataattagaagaaggatattgctttggaaattgtgcatttttgctgtcgaggctcgcgagagccttgtggattgaaatactgcatacatgtttggggctaagtggaaagcaagtcgaggctcgcgagagccttgtggattgaaataaacaggctgtatttgcaatcagacaggatgtgagtcgaggctcgcgagagccttatggattgaaatttcgtaggcataaaccctaatatttactgtttcatcgtcgaggctcgcgagagccttgtggattgaaattaaaaaataacgttgatttcatttctgtcaacggtcgaggctcgcgagggaaactcggtagagattaaaatcagattcgtttttaattaatagagatttagtgcgaatgtcaagtgcacagaaatttgcaggggaagcgcactagaaagtatgctatattgaataggctatgaggtatggaggaaggatatacttgctatggttgagcaaaatgtgtacaatgtgactatatattgcgattttcaatgagataattatgtataattgcagtcgttcccttcgttgagaacgtggattgaaatcctatcagcatcggatgaattccttttgtcagaaagtcgttcccttcgctgggaacggggattgaaatgggtatcgataaataatagtcgatgcccatcttggtcgttcccttcgttgggaacatggattggattagtaataaatttcctgcttatctgccgtaaaatagaattctaaggagatagtaaacatgatattcgacttttacccatggaaaatggatatcgatattaaagctacgaaacaactttatgagagaaaagactacgccaaagataggaatgccaataaaactatgtttcaggagatgtccgaaaaacagagaaatttttttatatccgtaggtgttgacatattaaaagcaaaagtaatagagaaagttcataatattccaagtgatggggaattgactggcgggaagatttatagtaggacactggattttttaatgtgtgggaagttcctttctataccagattaccaggaagaagtatacagtgatgaagaaatattcggtatgaatttttcccattctttacgagttatttctatgccggaggaacagaaaattcctgtattcgatattgatgggtgggggtgtgtatttaagcatcctttatttagattcggggaagaggattttaaacaatgggattgtggttacatagcaggcactatattgcttatgaaagacctataattaaaatttctggaaccattattgagtaatattgttttaaaaaagttttataaaattgtactgcaacttatgggaaagggagtacacgcatgtgatttagttgtaactttttctgattgggtataagaaaactgaaggaacgatagtgaacatacaatgagaatacatatgaagagaaaaacgcggagattttttatgtggatatggattttggcagccaatttcttttgggcatttgcacttatcactattagttattcctggggatatgatcaatgcgccattgatgggaacatcgcatattttagccacccggcatatcttaatattataaatggtatcccctggcttttaggcacacttgtgtttggcggtttagggattctgttttaccggaaaagtaatatatagaagcaaaagataagggggataaatgatatacataaacagtatagcagatatgatagaatttatcagagcctgcgacaaatatgaattagactgtgcatcatccattaactttaggatgccaaattacgagatttcgccaaaagaatttttagagtttgcagatatagatttaagagacacaacggttaaagggaaggtgggagcagtttcgaatctgaaaagggcgctggattgccagctggatatgttttttgaggctgtcaatatcaaaagtatctttgacagcaaaaatctcaaattcagtaaaaagatacaatttctatcggatataggaatgcttctcaccaacgcaatgaacaaacttaataccatcagaaacagaatggaacataattatcttgtcccgacaattgaagatttagaggtatattatgagatggtgtggaacgtgattgagatcattaacctaaatgtgcatataatgaaaatgggagaaatcaggtatgtagcaagtgcagggcaggagaagttttatgtggaaaatgggtatgatatctcccaaagaagtttttggtttaaaattactcagagaaaaaccagagatacaaacagcataatcaaatccttgtataagcaagacgactatacagagtatgtcagggcattccaggtattccgatgcaatatagacttttatgacagtgataatgcgaaggagtataaaaagagattaaaagaaataagtcttattgatatataatgatagaggagaaaactgatgagagaatttgcagcagcagcccttccctggattgtcattggaatagcagttgccgttcttttggcatacagagggaagaagaagggtgagtatgagacttgtatgacagaggggatgtgtattggaatgtgtatcggaaccgcaatcggcagttcaggaatccttgatttaggattgggcataagcctggggatgctgttgggggaattggccggtatgaacatcaaaaaataaaaacggcatgataaggggtatcatgttaagatgggcggtatgatatgaggatagagattgaattagcgtatgataacaaagaagaggtacaggctcttttttcagaatacacgcagatgctgaagcgtatggagcctgatatggtcaggtgtctggaacatcaggattacagcagggaaattttacatcctgaggataagtacgggctgcctcagggaagactctatattgcatgggtggacggtaaaccggcagggtgcataggaatgcacaaatttaacgaaaacagttgtgaaatgaaacgactatatgtaaagccagagtaccggggccgtaagcttgccagcttgctgatagacaaaatactggaggatgcaagggagataggttatcgggagatggtgttagataccatgacatttttagatgccgcaatttccttatatctgaaatatggattttgtgaaacagaggcctactatgagaatcctgtgaagggtgcggtctatatgaaactggagctgtaaagtgtaatcacaggagcgaaatcatccagaaggagtaaatatgagaaaactaagaaagatgctgggagatataacggatccttctgttgtatcgctcatgagattgattgaaacccagagcaaggctaccttatccggatgggcggtagattacgcagagaagcactatctggggatttaccagaaggtgtatgcagatgaacgcagactgcaggaggcagtttccggagtgagggaatatctggacgggagcagaaaacagaaggacttaaagccgcttctgcaagctgccgtgcaggcggcacaggaggcagtggacaatcccccggcacaggctgctgcccgggcggtagcgacagcctgcagaacggtccagtcccctgccagtgcactggggtttgctttttatggggcagcggcgtctgcctacgagaaggcaggactggtagagagccaggaggtgtatgatgctcttgcttctaatgaactggtacaaatattgggatctctcagggagaacgctgtatctggtgagaaaaatccggttacgattaagtggaactgctgagtcaaggtacagtttttaggagcacatgccctgactcaaaaggcggggcatccgcacgctctgcgatgagttttctgtgagcgatgcgcagttcttcctgatatttagccagatatgcgggaaactctttccatttctccagggaagcattctggattaacttttcttcctgcatatgggcctggatgaccagatgatagtagagctgagggtctatctggtctgcccggcatacctttgtgagaagttctgtaattgccttatatttctcccagagctgactggttgcttttgcacggtgatagggaaaaagcaggcaatttatgatatagccgatagctgcaccggcgagaatatatccgagccggatgaggaaaataccgcccactgcctgaaaaccaaaggcattcatgaacacagctccccccagggcacctacggtggagcaggcaaaggtttccttatagtcagtaaagtaaaatgaaagatagcccgacagcatcatggcagcggtgcgccctgccggggaggaaatcagggaatagatagccacagagatcagtccgcccagtatagtggcgaagatcctgttcttaatcttctgggggacatcatctgcatagggcagggaaacggaggccagggtgaacaaaagccatcgtccatgaggcagggggagatactgtaccgccagcacagcaagggataaaagcagtgctgtccgaagggcatagatggcacgcacaggactcagatcaatggcagactgcagccgtattttaaaagagagggcggatttgcggaaatggactcgcccctggggatctgtcatatgaagcagcctgtcacggatataaaggaggatattgttaaaaacccgggctgttttttcatctgtcagtgcagccaaaacggagggatccaaagcagggatctcagcgcgttcctgcaggataaacgcatgaaattggctcagctgtatatcgatgcagtgcagaaattctttattctggggggacgggctggaggagagttcatgtatcagtatggccagctgttccagcccccgtccggcggcaaccatggaataactggagtcagagatacaaaaagctttttttcttctctcgtatactgtctgacttaaccggcacagcttacttcgcatacccggcagatccggctcatgtgtaaggttttccgtatcactggaaatagtgctgcggatatcctcaatcatttcacttaacacatctctggcggtttcagccactcgctttcttcccatgatccactgatacagcatgatagatacagctccaaccagcatccccagaatccgtttgggaagctgagaagctgtaacaggtgaaataaaaaccagaaacagatacgacagaatataaggaaagtacatgtgactggcatactcatatgtaaaggcgtacaaaatcatgagaagtgtggcaaaattaatgagaaaggataaagacgccggacaggcagtgaccaaataggcagcaacggccatccataccaggaccagtgcctgaagaataaagtgtttaaggggcgcggctgtcagatcccgtaccatggatgctgacatcataatggtgaagatcacaccgacaattgagtgaacagggccaaataggatctgaaaaatatttacatatgcgataataaatagaaagctgagggtgctgaaacggaagtttttccggattctctcagatagtttggaactgcatttcatagatcacgacatctcctttaatactgatcatcataaagatgataattgactttagcctatagtactatataatgggaataagaagtcatataataatgatagtcatattttgtttactaatctacaagaatagcatttccggatgtatttgtcaatgggagaaggagaatatgaaaactgaaaaagtatcagaagaatttgttcaaaacctgctttcggtactgccgaactggcattccaagcttgtgcgtccttttaaagatacactgaacggagagatgagcctggaaacctattattgtctggagactcttaaaattcaaggcgcagtaactatgacggaactggcccatctgctcaaggtccccaagcagcaggtgacaaagctggcagagaagttgagactgcatggtttcgtagagagggtatacaacgagaaggatcgaagagtcatcaggcttcgtctgacccagaaggcaattctgtatctggacgagtatcatcttaagaatacggcattcatccagagccttgagaaccagctggatgcagaggagctgcggaaactgaatcaggcggttgagcttctgggagagatacttcctaaattaaaataaaatatatgtcacaaaacgtctgcgcctgggtctaatttaataggaggtaaaaaactatgaatagaaatcaaaaagagacatcggtactgatagatcaggctgtggagggagacagagaggcgctggaggcattgctgactcaagtgcaggatatgatattcaatctgtctctgcgcatgctgggcactgtgccggacgctgaggacgcatcccaggaaattctgattaaggtaatgacacacctgtcgtcatttcgtaaagagagcagctttactacctgggtattccggattgccgtaaattatctcaaggattacaggaaaaatatgttttctcatcatcctctgagcttcgaaatatacgaggaggatattgccagcggaagggagaaagatatccctgatttgtcccagggggtggatcgtacagttttagaagaagaactgaaaatgtcatgtacaaatgttatgctgcagtgtctggatcgggaaagcagatgtatctatattctgggaactatgttccgggcagacagccgtatggcgggagagattttgggaatgactcctgaggcatacaggaaacggctgtccagaatccgggaaagaatgggaacctttttgagcgaatactgtggcttatccggaacaggaatctgcagctgtaaaaaacgaacggattatgccatagcaacccatcgtctgcacccggaacagctggaatacagagctttggaacatacggaaagagacattatgctggaatgcaaagaggcgatggaaaaagtagacgacttgtccctgatctttgcaaacatgcccttttacaggacaagcagcaaagccagcgagtggatgaaacgctttttgaggtcagaggaatttaaaattatcgctgaagccggggagggatgcggatgaatacaaagctgatactggaatatctgagggaattggaggagaataacagcagagagtggttccatgggcacaaggaggaatatcaggccgcaaatggagaatttctaaaactgattgaggcttttatgctggagctgggcaaagaagatgccggaatcctggacttcgagccgggaaaactcacctttaagctggtaagggatacccgattcagcaaagacaaatccccttatcttcctgccttcagagctcatatctcatcgaaaggaaagctgccggtgccggtggggtattacctgatgataaaaccgggctcttcttttttggggggaggattatttgcagatatgtttaagaacgccacccaaatggtaagacgctatattgcagaacatggtgaggagtggcaaagtgttctggacgtgcctgagttccaaaggtattttcaggtcaaagggactgctctgaaaaatgttccccagggatttgagaaggaccatccccaggcagagttcctgaaatacaaaagctggtatctggaatatcctattccggataaggagttagaagacggagaggcgttttttcagagagcactggagatctacagagttatgaaaccctttaattcgttcctgaacaaagctttgaaggagtttgaaatgcctgcccgaccgtaaggggagtaaatatcttttctgatatcgtttcattttgtttcgtatccacgcattcattgacataagatcattggacatgataaaataaactattatttacccatcatgaaaatggtaatatgtgggttttacagggcagaacgatgtgatacatgtgtgggcggaaaagaaaacggcagttagaaaaggaggaacaacatggcgttttattatcaggaaccatccagaacattcagcgaatatcttttaattccggggtactcttctacaaagtgcattccctcggaggttaggctgaatacacccttagtgaggtatgagaaaggcacaaaaccggcgttatccataaatatcccgctggtttctgcgatcatgcagtccgtctctgatgacaggctggctgtggcccttgcacaggagggcggcttatcctttatttacggttcccagtcggttgaaagccagtcggaaatggtaaggaaggtaaaaaaatacagggcgggatttgtggtaagtgactctaacgtatctcctgagatgactctgcaggatgtgcttgatatcacagaaaaaaccgggcattccactgtagcggtaacctcagacggcaaaccgggagggaaacttctggggattgtaaccaataaggactacagggtcagccggatgggaccggataccaaagtgggagattttatgaccaggtttgaagatctggtgtatgcggatgaggagaccagtctgaaggccgccaacgatattatctgggaacataaaatcaactgtctgcccctggtgaataaaaaacaggagctggtctatcttgtgttcagaaaggattacgacacgcacaagaagaatgagaacgaattaatagacggttccaagaggtatatggttggagcagggattaacacaagggattacaaagagcgggtgcccgcgcttctggatgccggagcggatgttctttgcatagacagctcggaagggttttccgagtggcagaagattaccattgattatatcaaggagacctttggccctgaggtgaaggtaggggccggcaacgtagtggatgcggaaggatttcgtttcctggcagatgcgggcgctgattttgtaaaggtaggaatcggcggcggagcgatctgtattacccgggaacagaagggaatcggccggggacaggccactgccttgattgaggtggctaaagccagggatgagtattacgaagaaacaggtatctatattcctatatgttccgatgggggcatcgtacatgattatcacatcactctggcgttggctatgggggctgactttattatgttgggaagatacttcgccagattcgatgaaagccccacgaagagagtgaacatcaacgggagctatatgaaagagtactggggtgagggaagcgcaagggcaagaaactggcagagatatgacatgggcggagataaaaagctatcttttgaggaaggtgtagattcttttgtgccatatgccggcagcctgaaggacaatgtgacactgaccttatctaaggtgcgatccactatgtgtaactgcggagcgcttaccatacctgagcttcagagtaaggctaaaatcactctggtatcctcaacgagtattgttgagggcggggcccatgatgttatgctgagagataagagatagaatagaataattgtatctaaaggcgtcagagcacacatgctccggcgcttttttaaacgaaaatattttcgtgaaatgaaattcttgtgggtgaggggataatctagtacaatggaaagagcaaacgctttgttgtaaatattcgggtattatctcggaagtggtctgtgattcagagaaaagtatgagaaggagcattggttatggagaaccaggaacagaagcataaacggcgtgtccgctataaagggacacatcccaaaaaatatagtgaaaaatacaaggagctgcagccggagaaatatccggaaacagtggagaaagtgattcagaaggggagtactcctgtagggatgcatatctccatctgcgtaaaggaaattttagagttttttcaaataaaaccaggtcagacaggtctggatgctacgcttggatatggaggccatacactggaaatgctgaaatgtcttggaacagaggggcatatttacgctctggacgtggacgctgtggaaatggagaaaacaagaaagcgtctgcaagggctggggtacggacccgagctgctgaccataaagcagatgaattttgctgatattgatcagctggcggaggaggccgggccttttaattttgttctggcggatctgggcgtatcttcgatgcagatagataatccggacagggggttttcttttaaaaaggacgggcccctggatctgcgcctgaacccgcagaaaggaatttctgcagcagaacgcctgcagcagatccaacagggggaactggagggtatgcttgaagaaaatgcggatgaaccctatgccagggagatttcaggggcagtgatacgggagataaagaagggtaagaaaatcagcacaacgactgaacttcagcaggtgatagcaggcgctctgtcttttctgcctcaaaacgagagaaaagaggcagtgaaaaagtcctgccagaggactttccaggctcttagaatcgacatcaataatgaatacgaggtgctgtaccagtttttggaaaaactgcccggtgtactggcagaaggcggccgcgtggctatactgacctttcattccggtgaggacagaattgtaaagaggtcttttaaagagcttcaccgcaagggaatatacagcgagatagcaacagaggtgattcgcccttcaagagaagagtgcagcaggaacagcagggcccgttccacaaagatgagatgggctgtaaggtcgcagaacatcggtgagtagatgattacgcgtgccgcttgaagacagaaaaaatcatagaaataggaggttgcatatgaaagaatatccactgagcgaggtggaagcatttgcctgtgaaatattgaataagtattactgtgagtgtgatgtggaatttctcaattctacatttgcagaggacattgtgtggattggagcgggcgaaggacagaaagcagagggaaaagaggctgtgaccgcatattttactcagaaaaaaagggatatggccccctgggatgtgtcttatgaaatatatgaaacaaggagactggggtctgactgctatctgtgcgaggggagcagcaggataagcttctgtaaaaggacggagatgcttctggacaatcagcagaggtttacctttatcttcagagacaacgggggaaagctggaaaccatacatatccacaatctgatgccgtatccgggctggcaggaggcagtacaggcggctatctttaaagtctatcctttgattttaaaactaaatcttacacaggatacgtacagatgctttagtgaggaagagatacagtttattgacaaaacagaaggagtgtactctgaaatttacagcagttcactgccgggtatccatcctgaacaccgggataaatatgcgtcggtacttgcaagagaaaagcttatggaacggttttcccggggagagcgggaagtatatctggactttcagcaggaagggacaaatggggaatatggctggcgctctgtctgcgtcattcagatggagaaccctttcagcccggacgtaatggccatcgggttggttaaagtgcaggacactcaaaaagaaaaacaagaggaacaggagcagcttctccgtggggcattgcagtctgccaatgcgtccagcctggcaaaatcagattttctctcaagaattagccatgatatcagaacttccatgaatggtattgtcgggatgagtgccattggacagagaaatctgcagaagccggacactgtgctggagtgtttccagaagatagatgcctcctcaaaatatctttttgacatacttaatgatattttagatgtgtcaaagctggagacgggcaaaatggagcttatcagccagtgcttcagccttcaggtactgctggaggaagtgaatcatatcatcaccccccaggcaaaggggcggaggctgatctatgaagagtacaaaaaggggctggagacagagtattatgtgggggatgcagccagaattaagcaaattctgatcaatttattgagcaattcactgaaatttactcctgcaggcggaaaggtaattatgagtgtcaggcaggaagacgaaaattatgacctgtcttttctggagttttgcatctgcgacactgggattggaatctcagaggcgtttcttcagaggatttttcagccatttgaacgggagattccagaggtgatatgcgataatccgggaagcgggctgggcctttctattgcctatagcctggttcatctgatgggaggcacgatcgaggctgacagcaaaaagggagaggggacacagattacagtgagacttcctcttgcgccagtttacgaagaagagacagtatacggtaaaaacagcaacagctggtgggaggaagaagaatcggaggattttgatttttatggatacagagtgctccttgcggaggataatgaactcaacagagagattgcctgcactcttctggagatgaatggcattgaggttgagactgcggagaacggccaggaggcagtggatatgttttctgagaatcctccgggttattatatggcgatccttatggatattcgcatgcctgttatggatggactggaaagcacctgtgcgatccgggcccttgaccggggggatgctcagacaataccaattattgctatgacagcgaatgcctttcaggaggatgaagaggaggccagaaaaatcggaatggatgggtatctggtgaagcccctggaggtagatgcaattttcagggagcttagacattacgtgtaacggtacacagcagaatgatgacaggcctttcacagcggcagtccaggtaagtcctggactttccgcaatgctggaagaggaatcacagacggcctataagataccgtatatcgtattccatacatagcccaaaagaggggaaccaaggaaaaagtaaaagaggaaaatgagcagtatggtgcaaagcccggtatatttgagagagaagccttcctccttctgcatatgcatctgaaaaattgtcaattttcggaaacataacgtgaagattccgtagccggctgctgtccccagagtattcatcagcagatcatctatgtccgttgccctccagttaaaaagctggctggtttcgatgagcagggaaaacaggaaccccgccatgactgtccgcttgaggctttggctgcttttccacaaaacaggaagagcaatccccagaggtacaaaaagtataatgttcataattaagccaaaggggctgtttaaaccccaccgcagagggattagattaatttcctccagacggatcagagagtcagcgtggcggcctatgtcatcgatacctcctgccccggtgatggaaaatacagcggtcatcagacaggccagcagctgccatccaataaggaacccccaggtcagccttatgcctttctgcctgtaaaagatacaaaatcctgtctcaaggagaagatagggcaggaaaagaattagataattttctaacgcattaaatatataagacatttcagtcacctcctggtatataaaaatatcacagaaatcttaatatggaagaaagattatgcttaatactttcttaaactaaatataagtttcgcctgcccgggagcagcgcagcagatgaaagcggaagaaagaaaccataataaggaactgaaacgtcagatgaatagaagcctgagagaaagatgactgcagaaggagaagggcgggacgcataatacaatatgcggtccgcccttctccttctgcagtcatatcctggaacggcggctcagcttgagccgtcaatctgatctaaagtcttaaacgtataccccatctcttcccattttgtgagaagttcatccatgatatcagcgtttgtcttggaagtactgtggagcaacactatggctcctggatggatacggccaagcagctttttatacgcttcctctttggtaggctgattatcctgataccagtctacataggccagactccagaaaaaggtcttatatcccagttcctttgccatctggagattgtttacactgtattttccctggggtggccgatagaacttggtaataggttctccggtggtctgctcatagagcgtttctaattcactcatttctttggagaatgcgtccatactggagattttggacatatcgggatggtggtatgtatgatttcccacagtgtgtccctccgccaccattcgctttaccagatccggactggttgaaatgaaattgcctaccacaaaaaaggtggcgtgcacattatgtttttttaatgcatccaggatgggagctgtattgccgttctcataccccgcgtcaaaggtgaggtacaacactttctcctcggtatcctcggcataataagcgtcatactgcttaagttcatccatagtggcattgccgatgggaggttttccctcctcgggaaaactaaggccccagttcccttccgctgaagtctgaatagctgctgcctgccgggacggaaccttctgtgcaataaacctgccggcaagaaaggccgccgcgaagagaagtgtgattttaaagaagtttttaacgaaggttttattgatcataagaatcgccaatttgtatttgttttaagtatattgtgatacttttcaaaatatacccattgcagacgggaaagattcctcctttgaaaaagaaaaggtttgacaggaaaatcctatttgcaggtggaaaaaagatgggcccgatgatatactgagagtaagttttcccggcagatgcgaagacttccgggacttttttacttaatattgggaggattttatatggtacttttagaacaggaagacagatataaaattgagcccttatttgaagggtggcaggagactatgatatggtcctgccttcagggatatatggggagagcctgggcggatcgaagggaccaccccacatcggcacggattatagtaggggggttttgtttttttgccggttctcccaacagagaaatggttggaagtatgcccagggactgtatctcggatgttatcctaatgattccccagaacaattactggtcccggcttattgaaaaggaatacaataaaaattatgttgttaccacccggtatgccataaaaaaagaaccggatgtttttgatcgggagaagctttccgggtatgctcatgctctgcctccaggctatgagctgagtagaattgataaggaacttttcagaattctgaacagacagaaatggtctgctgacttctgttcacagttcagcgggtggccggagtatgagaagcatgggctgggagttgttgctgtgtatgagggaaaccctgtatcgggggcctcttcctatacgtattatgacaggggcattgagattgaaattgataccaggcgtgatcacagaagaaagggacttgctctggcatgcggggcaagactaatcctggagtgtctggagcgggggctgtatcccagctgggatgcccatgacaaacgctcagtggcccttgcagagaaattggggtatcatctcgacaaaccttacacaacgtatattatttcagaccttaattaagtgacggaaaattcatataactttttcttgcatccggcttcaaaacagtatatagtggattccggattacttttgaggagaggttattatgaaagagaaagaaaggaaatcatctgccagggatatgacccagggaagccctatgagacttattttgggctttgctcttcccatgatgctgggttttttgtttcagcagttttataatatggcagatactgtaatagtaggaagatttttgggagtgaatgcactggctgctgtgggggcaactggttccattaacttctttgtaattgggttctgcatgggaatctgcaatggatttgccataccggtggctcagaagttcggggcaaaggacgaaaaagggttgaaagcctatgtggcgaacagtgccattctggcagcaatttttggaattgtgatgacggtgcttgtggtactgttctgcagagagatcctggaaatcatgaatactcccgcagacattgctgacggtgcctatgattatattataattatatttgcgggaataccggcgaccatcctgtataatatggtgtcaggatacatacgttccctgggggacgccaagacaccggttgtgtttctcaccatttcctccatattgaatattatactggatcttgtctgtattctggttttggagatgggagtggcgggagctgcctgggcgaccattgtatctcagggagtatccggaatcgcctgtttggtgtatatgataaaacattatcctgtgcttagactgaagagggaggagtggaggctgaacagccatttcgttggggttttgtgcaagatgggaattcccatggggctgcagtattcaattactgccattggcagtgtaattcttcaggtggcagtaaactctctgggagcggcagcagtggcggcagttgctgccggatctaaaatcggctgctttttctgctgcccttatgatgctttgggagctaccatggctacctatggaggacagaatgtgggggcaagaagactggatcgaatcggtgccggcctgaaaagctgtgttcttctgggaactgcctactcaggaatctctctggctctgattttactctggggaaagaatatctcctacctgtttgtgagcaggggggagacggggattgttcaggatatctatcagttcctggtcttaaacgcagtgttttatttccttctttctctggtgaacagtatccgtttcctgattcagggaatgggatacagtatatttgcggtaacagcaggagtctgtgagatggttgcccgcaccttggttgcgtttttcctggtgccggtattcggatacactgccatctgtctgtcaaacggactggcctgggtggcagcggatctgttcctggttccggcctatttttatgtggtaaagcatcttcgaaagatgcttggtatcagaaaaggggatgtgctttagcggcatgtcccctttgtggctgctttattcctatacatattctgatctgccgcggataagaggctgtcaatatctttgtcactgtctccggcattatgggcataccccctggcaattgacagggaatagcggctttttgtgttgaactgtgcgatctccagatccataacctgaaaaagaggttcaggagaaatattccccttttttatgagaactacaaattcatctccgccgatgcggtaggtggttccaacttcctgaaaggcattcttgatactgcctgcagcgccttttaagagctcatcccctgccttgtgcccataggtatcattggtttccttcagattattcagatccagcatgacaacggtaagaggcatcccggagatacccgactgccggagtttgtcaatgcactcatcgaaagcgatgcggttgggcgtctgcgtcatgatatctgtgtaggcgagctgctgatacagctttgcctgagtgcgttcctccaaaaaacggattagattcttcccggacagaaatagcagaattcctataaacattacaagtccgtatctgaaaaagcggctattgtctgtgttggggtgcagatagaactgcaccatggcagcaatggaacagaggatcagcaggagaattgccgccagtattccctttgcttcaaaggaggcatggagcctgacctcgcggataaggaggacgatgataatcccgatatacaataggagaagaaggtgagttactggaagcatagatgggaaatcaaacaattccatgctgtacagtaaaaattggacgattatgtttacaagcaatacacactgcatccctgtgaggagtgttttaccctgacggcaggcagagcgtacaaaggacagcagagggatgggcagtgccataaatgaaaaaaaggaaatcaggcataccatggtagcattgctgcataatagctgagggagttccgaatcagaccacatccaaagagcagacagtaataggaaactgccgatatgcagaaagctcttataatcataggacagctttttaacatcctgtacaaggtacaccagatataacagcagggcggtcagaaacataaaaatcagacatacggccagggaaaagttattagagatgatgtccagaataaaggcatctgaggaacccagctctatattttgcagtccattgactgtaattgagacagtattttttaagtgcagactaattgtctgtccttcatactccggactcaatggaatgtaacacctgaaatttcccagtagttttcctgccggtgaggcagatgaagttttgtattcgtatatgcagagatctcctgcgtaagccttgatttcctgaaactgatttttaaaactcaggtattttatgtcggtcaggggcggtattttgtgatagagtatgagttcatctcccccaaaagacagcgaaaaaggaaaagaggcaatggtatgtttctcatcttcctccatataataccagccttctgtgaacgaagtatcctcttcctcaggcggtcggatatccggaagatccgatgtaaaaaaaacagtacctaagattccaaggaaaaataaggatgcacagatccagaggatattacgtattaacttttgaagatgtctgctttctattaagggcatattctctcttccttctctattaggtacatagccgatactaattatattgtgacagaaagtcaatgatatttcaagataatatattagcctgcgcagagaaatgacggttgggaagaacttacggataggcggtggcctgtgtgtgtgatatactataattactatacaattaaattacagtaacggaggaagttagacatgatacaggacattgcgcctcatgagtaccataatgaatggaggcctcagccgcctgaagctgaaagctatgtattattttaccgggggaaggaggtactggtgaaatggaagggagaagcattggattttcccagattttccgatctggaggacataaacgacagtctctacgaaaccagtacctatctctttaccattgacaatgaaagatattatcttctggaaaacattgcgtatcctttggaggatgcctatcggatggagaacctggagattttcagaacggtctcccctggatacctggcttttgcgggaattacaggtgcccagctgtaccgctggtaccagagccacaggttctgcggaaaatgcgggaagcagatggtacatagcgaaaaggaacgtatggtgtactgtccggactgcaataccatggaataccccaagatatctcctgcagtcatagtggcggtaaccaataataacagactgcttatgtcaaaatacgcaaaccgggactttaaaaaatatgcgcttatagccggctttgtggagatcggagaaactgtggaggagacagtcaggcgggaggttatggaagaagtcggcttgaaggtgaagaacctgagatattataaaagccagccatggtcctttacggataccatactcatgggattttttgctgagcttgacggagaagaggaaatcaccctggaccgggaggagctggctatggcagagtggtttgagcgggaggagattccggtaaaggagcagagtgtcagtcttacgaatgagatgatactgaagttcaaggcaggggaggtatgattgtaataatgaatggaacttgtatggagcttagttctgggatctattaatcgggtgtggaagaagaacaatgagaggaagcccgccgacacgggctccctctcacctgatcatggaaaagctccacaaaaaaactacatctctttcattatttcaaacaaactaatctgccgtaattccccatcttccttttcttttccaattctctctctttgcaccagcttctccgggatatcctctataaatggagagggcttttcagctgcagtgattagcaccagttcttctttcgcccgtgtaagacccacatagaagagacgccgctcttcttccagggcagcctcttcccgggcctgggacaggggcaggatgcctttgtttagccccgccagaaagacggcggggtattctaatcctttggccgcgtggagagtcatcagggttactgcgccggaggtgtagccttttccccagctgcgcttcagatcactctcctggccaaaggtaacggtatccaggagcgactgcatagtggggtggaacactgccatatttgaaaatttgcataggaattcatcttccgaaagcccgagatcctgtatccaggagtctatcagcttctggggtttagttcttttcaccctggaggtatattttgttgtaagggtctccagaacatcacggtctctaagtggttccagatgtctttggctgagtgccagggcggaggtatcctccgggtggaggagatgccggaaaaagctgagcgtaccttttacggagggatgcgagaggtagtcctcacgaccggtgacaatataggggatgccctcctttttcagacatttttctaacagctgtgcctgacggtgtgtgcggtagagaatggcaatatccgaaaatccatagacacgccgttctatgactcctccggtatccacatccagcatatcaatgcctcctaccatgcggttgatttctttggcaatatagattccctcggagaggcctccgggacataaggccaggcggacaggcatgcctttaggggatacgggacaaaggggccggtgttctcccgggctgcgggagattactgtatgagcaagagagaggattcccccggaggaacggtagttttcttccagataaatttgtgtaagtttcggatagtcttctctaagatgctggaaacatagggcatctgccccccggaaaccatagattgcctgatcgggatctccaatgacaaacagttcttttccgtttcggttccacagctgaatcagccggtactgcaggggactgatatcctgaaattcgtctaccagaagatagctgaaacgttcccccagaacagatgaggcatcttcccgttccaaaagttcaatggtcttcaccaggagatcatcaaaatccaggagcttattcccttgaagcgatgctgcgtaagtctgaaatgcttccccgggaagggcggagctgacctgtgtcattccggtttttatccgggagacttcttttataaatgtttccggactgacggataattcatagctggagattacttctccggctttgtccaggagtgtatattcatctgcaaggatatacccgggatatacactggtgtagagctgatagcagatggcgtggaaggttcccacgttcagctgtctgagacttctggaatttcccagctccaaagccaggcgttcttccatctgagcggctgcttttctggtaaaggtaacggcagtaatcttagacggacccactttgcgctcctggagaagatatagaatcttggcggtaagggtatgcgtcttgccggttccgggtcctgcaatgactgcgcatacaggagcataagagtgcacggcctcctcctgcctggcattcaggctttgggtaagtgaacggggaaatgctctcttcgtggactgcccgtcactgggcgacgcttcgttactcacagaggtctccggtatggagggtacggaatcagtactccggtcagagggggacgccgcctccagagaggaaagctcttccatagaaaacagattcagctgaccactgaaaaggtctatctcgtagggatttaaaaccttaatggtgccgtactcaccgtcaaacccgggacttcgctccacacgcccctcccgcaggcgccggatgccctctgcaatcactggtcctgagatcttttgtatgtcctctgtggggatttccctgagaagagagaattccggccctaaatgcttcagaagcttttcatactcagcggttaccttcttgctggagggagacgaagctgtgcaggaggcaatgacctcggggagaggcaccagactttcgaagggtttaccctgtgagaggacaaagtcctccgggcggtcagccagttcttccactctgtgcagcaccccgatggtaagttttttgccgcagacagggcatttattaccgtgaagtgcggcctgtgcggggctgagccgcagatggcatttccggtggccgtcaaaatgatattttccctcttccgggaagaattctatggtaccggccagtccgtttcctgtctccaaagcttcacagagggcaggataagacagctcagtatccagaagattagcctcccggcccagtttggccggagagtgggcgtcggaattggataccagctgatacttgtcaagggcagaaagacgccagttcattgcgggatcagaggaaagccctgtctccagagcatgtatgtggggagtcagatcctcaaagcattcctctatggtatcaaagcctgagaaagcaccgaatagagaaaagtggggggtccatatgtgggctgggataaagacagcctgaggacaggtatccagggtgatctccaggagatcgcggcagtccagtccgagaatgggacgcccgtccgagtgaatattgccgatggcctccagttttctggacagggcctccgctgcttcaagccccggaagcagaataaggctgtggacttttcttactttctcattttttttataaatggagctgatttctcctgagacaacaaatctgggggactgtcccgggggacataaatccggatgccggaaagagagattcagagtatagaagccttcctcggccggaaccagcttttgggccagttcgtctctccaggcagggtgagtaaagtcaccggtgcctaagagctgtattccttttcttctggcccataagtccagatgttctggtgtgcattccctgctggtggcccgggaatacctggaatgtatatgaagatctgcaatgtacatgagttcacctgctttctgtaaatggtcagtatgggacagttctagggatgaagtaaagtaaggctggaggcatccaggtcattttcccggaaataggcctcgattttgcctttgctctcttttaaaagggtaataattcgttcgcttttttccggagtgtcacggtatatggggacactgacgctgaggccgcccacgacctcatggtcttttaccagagagactgcgatgcacaagatctgttcggtagcttcctccctctcttcggcatattctctgatccggcaaagctccaattcccggaacaatacgtcaaaatccgtaatggtttttggggttaccggatataagccgcgcggatagagctctcttaccttctgaggggaagcatgggagaggattgcctttcccattgccgtacagtagagcggcattcgtttgcctacataggacacaagacggatgggggcttcagattcctctttggcaatatacaaaagattagactgttcctggatgcccagctggcaggtttcctgggtttgccttacaatggttttcatttcctggtgtataaattccagagcggtcatactgctggtataggaagtccccacggaaaatgcggctatcccgatttggtaacgtgatgtatttttatttaaaaagataaactttcggtgtgccatggtgtgaaccaagggcatgatactgcttttgggggcatctaacgtatgggaaatttctgtaagagtcaatccttccggtgtgcttgctaataattccaggatatcaagtacccgttcggttggtctgtgactggttgctggcatatgaattctcctttcaactcttcaaattataacagaaatcgacaggaagagaaaccgctgcagaagagaaaatcttttgataaatatggttgacttgcctttctttaggtgataggatacaactataggtacgtaaatacatatatagtacgtatataagtactatgtaagataaaaaccagagaaaggaagagaaaaatgaaaaaagggaattattttactccggtagtaactgcatttgatgaaaatggccgtccggatatggacgcaaacagaaggatatgggaacatctgattgcaggcggggttgacgggctggtcatcatgggaagtatcggagaattttttgccatgtccagggaggaaaaagaggccattattgaccaggttacagactttgccggaggcaggacaaaattatacataggaactagctgtatgacaccggaggagaccgtggaattgtctaattatgctctggatgcaggggcagatgcggtgatggtaatcagcccttactatttttctctctcagatgagaatgtagagtacttttatgatgaagtagcggccaacattcgcggcaatatgttcctgtataatttcccggacagaacaggatatgatctcagtcccgaagttacaaggaatctgctgagaaagcacagcaacattatagggtataaggatacgctggggaatatgggacataccagaaagcttcttaacaccgtgatgggtgaatttcctgattttatggtgctctcaggttttgacgaattctttgtacataaccttttgggcgggggaagcggatgcattggaggtctgtccaatatctatccagaattatttgcctcatgggtagatgctgtggataaaaaggatatggagaaggcttccgggattcagcagattgtggacggtctgatggccatctatgatgtatcagccacctttattccggtcattaaaagagctatggttatccgtgggattgggatgcaggactgctgtaagaagccatttcttccagtcagtgaggaacaggataaaaagatacgaatgattatgaaagaggcagaacaaaggatggaaaagctctcttagcactgaaatcagacagaaaattaagaactcgtaaagaatcctccggattgcttgattcttaggaggccttcttctataatgcggctagaatcatccatgtgatgattcccaatacgctgcaggaacatattatataaggaaaaaaagcgtaatgggcgtcccagacggacgtgattacgctttttactttccgggggaggaattatggaattattaaagcggcagtcgccggggcgtctgattgtgttgggattcgccggtgtgatactgctaggtacatttttgctgatgatgccggtttctgtgagggaggggcagcaggtgagttttattaatgccctctttacctccacaagtgcagtatgcgttactggattgatcgccattgataccgcagatcactttactgtattcggaaggacaattgtggctcttctgatccagatcggaggtttgggggtcacatccgtaggggtagggctgatcttattaacaggaaagcgggttggaatgaagggaaggctgatggtaaaggaagccatgaatgtgggaagcctgaaaggaatggtacggctggtaaaggcggtactgctgatgacactctgctttgaggccgcaggggcggcactcagctttctggtatttgcgcaggactatcctccgctacaggcgctgggaatcagtgtgtttcatgcggtagctgcctttaataattccggctttgatattttgggagggctgaggaatctgatcccttaccagaatgacatccttttgaatcttaccaccagcggccttattattttcggaggtctgggatttcttgttatcctggatataggcaggaaacggtcctttaaaaagctatgtcttcactcgaaagtagtggttaccatgagtgtaattctgctggctgcaggtacactgcttttaaaagcaacggaagatatcagctggctgggagcatttttccagagtgtatcggcccgtaccgcagggttttcgtcatatcccattggagagtttacgaacgcggggctttttgtgctgattattctgatgtttatcggcgcgtcccctggttccaccgggggaggaataaaaaccagcactttttttgccctggtgcaggccacaaaaagcgcggccaccaatcaacattgttctgcttttcacaggaagctgccctatgaagtgttatcaaaggcatttattattacctttctgtcgatgctggtggtgtgtgcgggaacctttcttttgtgtatcctggaaccggaatacacttttgttcagcttctttttgagataacctccgcgtttggtacagtcggactttccacaggaattacacctgagctgggagatgcggggaaatatattgtaatactaactatgtttatcggcaggctaggtcccctgacgattgcttcgatctggagctttaggcctgcggcagcggccagatacagcgaagagagtataaccattggttaaggaggagagggttatgagaaaaaataagacagacgtttcctatggaattataggccttgggagattcggccaggcgctggcagtcacgttggcggatgcgggaaaagaagtggtggctgtggacaacaatgaaagtaaagtaaaagaaatccgccagtatacagaacatgcttatgtggcagaagagcttacaaaggaagtgctggaggagatagggatacagaactgtgatacggtgattgtatgtatcggagagaaaatagataccagtatccttactaccttaaatgtggtaaacttgggggtccctaacgtaattgccaaagccatcagccgggatcagggtatggtactggaaaagataggcgcagaggtggtttacccggagcgggatatggcactgagactagggaaacgtctgctgacaggctgtctgctggattatctgcccctggagaatggtgtggagattacagagattaaggccacagagaagattgtgggaaaaagtgtggtggaagtagagctgagaaaacggtacggactgaatattatagccattgagcatgaaaaccggacagagacggagataggacctgattacagattccaaaaaaatgatattattgtggtaattgggaaagatgaaaatgtggagaagttcgaagcctatctttgagatttccaaagttcttgcagacagaagcacgggaaagatgtataatggtatttgactgatccaaaaaagaaatacaaaggaggaaggaagatgctggaattaaagaatatttccttcgacgtgtcagaggatgcagaacaaaaaggaatattgcacaatataaatctgaagctgaaggataaccagttcatcgccgtcacaggaccaaacgggggaggaaagtcaacccttgcaaaaatcattgccgggattcaggcacctacagaggggcagattctctggaacggagaagacattacggataaaaacattacggagagagcccgtctgggaatcagctatgcgtttcagcagccggtccgcttcaaaggggtaacagtttttgaccttctgcagctggccagcggagagaatataacggttacaaaagcctgtgaatatctttcagaggtagggctgtgtgcaaaagattatattaagagagaagtcaatgccagcctttccgggggagagcttaagaggatagagattgcctctattcttgcgagatctactaagatctctatttttgatgagccggaagccggtattgacctgtggagctttcagaatctgatccaggtatttgagaagatgcatgaaaagatccacggaacgatcttggtaatttcccatcaggagaggatactgaatattgccgatgaaatcgtagtaatctcagacggcgggattaaaggacagggcagcagggatgagattctcccggatcttctcagcggagaggattcctacggagcctcctgctataagatggaggtgaaataaatggacgcaatacaaaagcatctgctggaagaagtggcagatctccacgcaattcccacaggggcctataatatcagggccaacggcaagagtgtagagcggaataccacaagcactgttgatattgtctctaaggaggacggcacgggaatcgatattatcataaaacccggtacaaagcgggagagtgtccatatcccggtagttctcagtcaggctggtcttaccgaggtggtatacaatgatttttatatcggtgaagatgcggatgtcaccattatcgcaggctgcggaatccacaatgggggtgccgagaacagcagacacgacgggattcaccggttttttataggaaagaatgcaaaagtcaaatatgtggaaaagcactatggaagcggcgacggtacgggcaagagaattatgaatcctcagactatcgttgagatggaagaggacagctatatggaaatggatacggttcagattaaaggtgtggattccaccaagagggagacgcgggcagttctcagggacggtgcgaagttagtggtaatggagcggctgatgacccatggcagccagacggctaccagtgaatttgcggtagatctcaacggagacggcgccagggcaaatgtaacctcaagatctgtggcaaaggaggagtctacccagctgtttatctccaagattaatggaaatgccaaatgcagcgggcatacagagtgtgatgccattatcatggatcacgcgaagatcagcgcagttcctgaaattactgcgaaccatccggatgcggaactgattcatgaagcagctatcggaaagattgcgggagagcagattattaagcttatgacgctggggctggcagaacaggaagccgaagagcagattgtaaatgggtttttaaaataaaatgcagggtccggccgcagatgcggtccggacccaagcctttttgcgggggaaatgtgaagggagagctaaacttcttgacacaatctctccaataagggaaaatagaagtatgtatgataggaaagaagagggcataagcgttatggctgacaaaacatttgcggtattaattgattcggataatatttcatccaaatacatctccgggattctggatgagatgacaaagtacggcgtgataacttacaaaagaatatacggggattggaccagcacccagacgaccaagtggaagcaggcccttctggagaattccattatgcccattcagcagttcagcaataccgtaggcaaaaatgctacggattcggcattaatcattgacgctatggatattttatataccaataatgtagacggtttctgcattgtatcaagtgacagcgattttaccaggctggcaagccggctcagagagtctggcaaagaggtgatcggtatgggagaggaaaaaacgcccagatccttccgggcggcctgtacggtattcacgaatctggagattctgttggatcaggatgaagaggaggaggaaaaggggaccgagccggacgaagaagctgccggaattccgaagaagaaaagagagattatcagcaaggggaatattgaagatgatattctttctattatcagtgagaatgatgataagggaaaggataccggcctgggtgagattggcagccgtctggtgaagaaatactcggattttgatgtccgcaattacggatacagttctctgtcaaaatttctggaagagatggacggatttgaactcaagaaaataaataatgccataacagtaaagatgaaggacaataaaacaaagaagcagaagctggcttcctatgccattgagctggttgagaagaatggtgaggagggtatggagcttgctgcccttggaaaccggatgcataagaaatttgataaatttaaggtgaaggattatggttatgcaacatttgcaaagtttgtccagagcattccccagctggaggtaacggaaaacaaactgaaaagcaaggttgtgtttcttaagaaaaagtaacataggggggcaaaatgaacatgaagcaaacatcagatcagaccttttttgcatgtgtgggcggcgtacttacctgcggctgcgatgcgggaggaaccatattgtgggcagatgatggcttttacaatatgctggattatacaaaatcggaatttgcagaaaagtttcagaataagattgcccctgtgattatttctgaggagcccggaaatggatggaaggaattttgcggtaaactcagtgaaaaaaaggtgcttctggcagaataccggctgcagtgcaaaaacggagatataaagtgggctgtctttagttccagacggatggaagaggaggggaaagaaccctatgcccttatcttttaccacgatatttccgtccgcaaaaagaggcagatatctgttcaggaacagattttaaaggatccccttacgggtctgtataataaaaaggccgcagagtctatgattcaggagtatcttgagagcagcagtgaggcggcggctctctttgtgattgatatagacaattttaaggggatcaatgataattttggccatatttacggagactctgtactcacggagatgtcacgtcatctgaaaagcattaccagaagtacggacattgtgggaagagtgggcggcgatgaatttatcgcattctttacagatataaaagggaaagaggggattatccgcaaagcaaaagaaataggcaagatgttttaccgttcttttgaggactcagatattcattatgagatatccggaagtataggaatctgtttctttcccgatgacggcaccacgtatctggaactctttgagaaagcagatgtggctgcctatttttctaaggataatgggaaaaatcaatataccgtttatcaggagaatatggagcacaaaagcctgcagactgcagacagcgggcaggaagagcaggacaaccagctggctttgtaccggaaggcttccaggggaggaacctttcagatccgcatggacgaaaactacacgctgctgtatggcaatgatatatactatcagatcatgggctatacgaagcaggaaatgaaagaaaagtttgggaatcagtgcaggaggaatgtttttccgggagatgtaaagcgggtggaggacttaataagcagggccacatacaccgggcagcatgttctggagtgggaaatgcggattattaccggacagggagagattcgctggatatgggtaaacggggctttggagtaccgttccaccgggtgtgtaatgagcggttttatcctggatacgacagaaagacatgaccttttatcccagatttccagaagtgaggagagataccggatagcgctgcagcagacccacatgaacgtgtgggagtatgacatccccaatcggagactgatccttacagaaagtgccagagagcaccatggttttggggagattgttgaaaatgtgccggagtatctcattgagtccggacatattcatccggacagtgtgaaggaagtgcgggagatgtaccgcaagatccgggagggagcgcccaggattgagggagagatccgcacaagaaatccccgggggaacggatggtggtgggagaaagtagtttatacctccatattcgacgaagatggccttccccagtgcgccattgccgtgggcgaggacatcacggcaaaaaaggaagcggagattaactaccagaaagagcttcagatgagatttgccatgtctgagggaatcatggccagcagccgggtgaatttgacccgaaattgtgtggaatatctgcaatccgagatcctgaatatagaagggaaagaaggtgcagtaaactatgacgatctggtgcaacagggagtgtccagaattgtaaattccgaggacaaggtgcgttatcttaagattatgtcctcagaagcattaaagtccgcttatgtgaaaggacagtcacaggtatccctggagtaccgctggctggatttgaacgaaaagctgatctggatcggtacctcggtgagtctggtaaaggatgcggttacgcaggatttgtatgcttatggaaagatgcgggatatagattaccagaaaaaactagagctgggactgaagcagagagctgagaaagacagtctcaccggggcttatcataaggaaaccgcgttcagtatcatgaatgcggcgatccgcaatgccagaagtctgggacatgattttgcagtgatacttttttctgtagataatttcagaagaattgacaggtgctgcggatacggggagggcggcaatgttttaaaagaactcagcagtcttttagatatgaagtttgggagccggtatctggcgggcagatacagtgaggatgagcttcttctgcttgttccgggaccaaagcagcaaaaggatctgtcgtataagacagaggatgtccgccagtcagtaagaatgtcatacgtattttctgaactggaggtgcccgtaaccgtatctgtggggatcgcagtctctggtgacggtataaaaaacatccgggaaggttgcggcaaagcaaaggaggcgttagacgctgcaaaggaaagaggcggagactgctgtgtcatgtattcccaggcgatggctgctgagaagaatctggtgattcaggaacttaaaggaacagcaagagagaatggggcgggagctgcaccggagaaggaggaggatgttctgcttaagtgtgtctattcccttacctcatccctggatattgaacaggtacttgaggaggtactgcgggagctgggagcatacttcagggcagaacacacgtatatactcatcttgggtgatgatatggagcggacggagtatctcaaagaatggagaagggatgggttaccttccaaaacgtctattcctttagcgcttttgcagcagattaagaatcaaatggctgttacagatataagcaagattgcggggatatatcccgaagagacagagatactgagagcagaggggatcttcagcttccaggtggtttccatggataaagttcacaatgggatctcgggatatattggcgtggagaatggggccagacatatggaaaggacgacagtactccattttgtccggcattttgtgggatatgagatcatgaggaggagacttcatgaaaagcaggaatacctcagctatcatgatgcgctcaccggattggagaaccgtaacagctttctgtcctaccgggacagtctttccgaagataccctgatttcccttggggtagtctctgccgatattaacggtctgaagcagctgaatacccagtatggccatgattacggcgattatatggtaaagttcaccggaagggtaatgcgtgaaaagtttaagggaggaaggattttccgttttgccggagatgagtttcttgctgtatttgaaaatttgtcgcagaaagcattttcggactgtgtagaggatatgagagctgccatggaggcatcttatccctccagtatatctctgggggcggtttggactgatacagagatgagtctggaacacgccataaccagagcagatgaaaggatgctccttgcaaaacaggaatattacagaagctcacagaatattgccaagcattatgacccggcaatgctgaaaaaacttttgaaggatatacaggacgggcgttaccatatgtttctacagcctaaggcagagatctccacatgcaggattgtgggggcggaggcattggtgcggtatatcgattctgatgggaaaatcgtggggcctgcccagtttattccccagcttgagcaggcagggaatgtccggcacgtggacctgtatatctttgaggaagtatgcagagccctgaaaagatggaaagaaaagggatatgcgtgtatccccgtatccctgaatttttcccgtaccacccttttagaagagggattgatccataaaattgaggagatctaccagaggtatcaggtggatcgaaatctcattgagattgaggtgacagagagcgcaagcgtgggagaacgggaaaccatagtggagatcagcggcagattagcttccctgggctatcggattgcgctggatgattttggggctaaatacagtaatatgtccattctctcagccatggagctggaggttttgaaactggatcggagtctggtttccgatttgttctccaatgagaagaccagggttgtagtgaagaattttctccagacctgcagacagctggggatccagagtgtggccgagggagtggaaagcagagaacagcttgaggtactggaagtccttggctgtgactatgcccagggatactactttaataaacccattccgctggaaaaatttgaagaattttatctgaaaagttcatcctgcggggagtacatagagattcattcataaaaatataacaaaggagaatactaaaaatgattagacaactttccgtttttattgaaaacgtgccagggagccttatgcaggttacgaaatgcctgaaggatgcagggataaatttgatggctatatcatcctttgacagcccggaattcgggatcctgaggatgattgtagatcagccggaagaggctgagggtatcttaaaaagaaatcactttatggtccgggtgggtactgtcctgggagtttctgtggcagacgagccgggggctctgaataagatgctggagattatggcccagggaaatataagtgtcaattacatctattcttttatcagtgagattgaccgctcacccatcatgatttttcacaccgagtatacggaggaagcaagacagctcctgaaaagaaacggaatgcatgtagtggataacctgaaagaactgtaaggagacagcagctatggaatatcagataataaccgacggttcctgtgatctgggagaggaactggcacagaaatatgggattcgggtagtacctttttatgtgtcatttgatgatgcgacgtatgaaaaggagatagaggaactggacgttcgccagttttacagaagaatggtagatcatcccggaagctatcccaaatcctctatgccaaacgtacaggattatctggaagcctttgagccctttgccagtgcaggggttcctgttatctgtatttgtatcactacaaaattcagcggatcttatgcttccgcgtctgccgccggtggaatacttctggagaaatatccgggagccaggataaaggtgattgacagtggtgtcaatacggtgctgcagggaatgcttgtcctggaggctgtaaagatgcagaaggcaggattcgggtttcaggaagctgcagacaaaatagaagagataaagggcagcggcagaatcttttttacgattggcagcatggaatatctggtgcatggaggccgtgtggggaaactaatgggactggctggcacaaccctggggattaagcctttaataacccttaaggacggggagatttttccttccggaataacaaggagccggagaaagtccagaaagaaggtgctggacctggtggaatcacattttcgggataccggggagaatccggaagactatctgatggtgatagggtatggatatgactatgaggaagctgtggaattcagggaggagatgcttgaattaatttcccattacacctctttgaaggatgcagacatctatcagattggcgctaccataggggtccataccggaccgtatcccctggggatagggatcctgaagaaggcagtaaaagagtaaggacagggaaaaggagcatggggatggataattgggaaaaagatacagatgaattcgtttatgataaggaacatctttatgatgccctggtacgcagcacagatgactatatttatataggaaatatgaaaaccggaaccttccgatatgcccccggaatggtgaaggactttgctctgccgggggaaatcgttcccaacgcggctgccgtctggggcgagttggtgcatccccatgaccgggaggcatttctcgaagcgaatcaggaggtggcggaaggaaagacacagaatcatcatgtggagtatcgggctaagaaccgcaaaggcgaatgggtctggctcagatgccgggggtatatgctgaaggatgagtctggagttccggatttgtttgccgggattgtaaccaatctggggaaaaagaacaggattgaccatatcacagggatttataacaagtttttgtttgaggaagaaattaaaaccaggattgtgacacggccggacgatacgtttggggtgatggtgctgggaatggatgatttcaggcatattaatgacttgtatgacagaaattttggagatgaagtgatccgcattaccgctcagaagatcgccacaatccttccgtctaatactgggttataccgtatggacggagatgaatttgcggttttggtatcgaatgttcagcccggggattttgataaaatattcctcagcattcaggaaacctttcacaggcagcagcagtacaatgataaaaaatattactgcactctctcaggcgggtgtgctacatacccggatgacggaaataattatcaggatctcataaaatattgcggttatgctctggagtatgccaaggatcacggaaaaaaccgtatgtgctgtttttccgaggcgattttaaaccataaggagcgggatctgcttttagttgaattattgagagaaagcatagaacaggagtacaggggatttcagctgtattatcagcctcaggtggaagccgccaccgggagagtaattggtgcggaagcactggcccgatgggagtgcagggagttcggcagtatctctcccatggagtttatcccgctgctggagaaaagtggtctgattattcaggccggaaagtggatttttaaaactgctgtggagcagtgtaagagatggagcagaaaaaaacgttcgtttacggtaagcattaatctttcttatctgcagatcctggagccggatttccttcattttgtgaaaaccactgttgaggaggcctgccttccggcaaccaatattgtagtggagctgacagagacactgctggtaaaggaaaatgaaaaaattacccggatatttgaggatattcagagtatgggcttttcagtagcgatggatgattttggcaccggatattcttctttgggagtactgaaaaatacgccggttaacattgtaaagatagataaaacctttgtggacggtgtggagaagaactcttttgatgccacctttatacggttcattgtggctctctgccacgatgtggggaaagaggtatgcctggagggcgtggagaccgcggcagagtatgagattgtgaagggcagcggtcttgaaatgattcagggatattattttggacatcctgtgagctgggaagaattcgaagaacggtatttgaactgatctgaggtgaaaaagcggggacgtgccgtacaggcccgtccccgctatagcgttctttaattttcaaaggtatcagaagtattggatgcccccggcttcaaaaagagatacttgcggacagcaaacaagattgcaatggcaagaattccaattaaagtttcccaggtggcaagatgctctacaaccatctgcctcgcagttgcaaacatgaggacttcaataagtgtctcaggggtatgcttgcagagcattttcacaaattcaactcccacaacaagactcagcgctcttgccaggaactgggtaaagtattctgaagtcatatgcagaaggggcatgctggtcagatcatatataagagcaatgaccagtgcggcaattacagccagaataataatggaaataacaagttccgtatagcgggatgcatgaaagacaagctcgttgattcgtttccttaagggctttttttccatgaaacctcctttatcattattttataccccagggtcttctggggtggagaatggttttattataggggaaataacatggaattacaagggaagtttttgggtttttctgctttaaagcgctaaaaaactagtgcaatattctgtagatttgtgctataataagatttaacgcagtaaagcagtatgatctagaatggaaaagaatcagatggctgttccgcagtaccactggggagacaaaaaggaatggtcagataggagaaattatgatttgggcaaaagaagaaacattatcaagagctgatatcgagacgatacagctggagaggctgcaggaaacggtccggcgtgtgtacggaaaggttcctgcataccgaaagaagatggaggaggcagggattgtgccggaggatatccgttctctggaagatctgcaaaggctgccgtttactacaaaacaggatatgagggataattatccctttggtctttttgcggtaccccaaaaggacctctgcagaattcatgcttccagcggtactactgggaaacctacggttgtgggatataccaggagggatctggatatatggtccgaatgtgtggcaaggatcgcatgcatgggaggagcctccagcggggatattgcacagatttgttttggatatggcatgtttacaggcgccctgggcctgcattacggactggagaaggtaggagcggctattgttccttcctccacgggcaatacgaaaaagcagattatgtttatgaaagactttgcgtctacccttttggtcgcaaccccttcttacgcacttcggattgcggaggttgcagaagaaatcggggttgatgtcaagaaagaattgaagataaagattggcctggtgggcagtgaactcatgacggaggctatgcgccaggagatgtacaaggcctggggagacaacatgatgcttacacagaactatggcatgagtgagctgatgggcccaggggtatccggagagtgtctggaactttgcggcatgcatgtgaatgaggaccattttattccggaaatcattaatccgaaaaccggagaagtgcttccgccaggggagatcggagagctggtaattacctgtatcacgaaagaggcgctgccgctgatacgttacagaaccaaggatcttaccagattaatgtatgaaccctgcaagtgcgggagaacgactgtgagaatggagaacctgctggggcgcaccgatgatatgcttaagattcggggagtgaatgtattccccagtcagatcgaagaaattcttctcaatatagaggagtgcggccctcactatgagattattgtgggcagaaagaaccactccgataccctggagattaaagtggaagtatccgcagacaaactgatggattcttataaagcgctggaaggcctggagagaaaggtaaaagaccagatccgtactgtgctgggcctggatgcaaaggtttccctgcagtcgcctaactcattgcagcggttcgagggaaaagcgaaaagggtcattgaccttagaaaggaaggagaataacagtggcagaaaaaaagataatgttaggaaatgaagccatcgcccgtggggcttatgaagcaggggtgaaggtttccgctgcatatcccggtaccccgagtacggagatcagcgagaatattgttaaatataaggagatctatgcagaatggtcacccaatgagaaggtggctgcagaagtggctatcggcgcttcaatcagcggtgtgcgggctatggtatccatgaagcatgtggggctgaacgtggcatctgaccctctttacactgtatcatacataggagccaaaggcgggctggtatttgttgtggcagatgaccccggaatgtacagctcacagaacgaacaggacactcgtctggtggcaagagccgcccaggtacctgttctggagccgtcggacagtgcggatgccaaggaattcatgaagtttgcgtttgatctgagtgagaaatatgacactcctgtgattgtaaggctgactacccgtctgtcccattctcaggggctggtggagttaaatgagagagaagaaccagaggataagccttatgagaggaatatcggcaagaacgttatgatgcccggcaatgccatcaaacgccatctggtggtagaggacagaatgaaccgcttggaagaagacagctgcaagttctccgtgaacagagcagaatacagggacacctccataggatttataaccagcggaatcccttaccagtatgtaagggaagctatgccggatgcatccgtacttaagcttggactggtaaaccccctgcccaggaaattaatcgaagagtttgcctcaaaagtggataaagtttatgtattcgaggaactggagcctgtaattgaggagcagatgaagtcctggggaatccgggtaataggaaaagaaatctttacccgtcagggagaatatagcgccaatcttctccgcacgactgtgctcggcgagaagctggatgtggcggcaccggccccggtacctcccagacctccgattctgtgtccgggatgtcctcacagaagtgtatactcagttatgaataaattaaaaatacatgctgcaggtgatatcggatgctatactctgggggcagtggctcctctcggtgtagtggataccaccatctgtatgggagccagcatcagttctcttcacggaatggagaaagcaaaaggaaaagattacataaagaattgggttgctgtgatcggtgattctacattcatgcatacaggaattaactctctgatcaatatggtttacaataaatctacaggaacagtagtcattctggataactctaccacaggtatgacagggcatcaggatcatgcggctaccggcaagactctgaaaggggagcctacttatgcagtgaacattccgcagctttgcaaatccatcggtattgaacatgtgtgtgagatcagtgcttttgatttgaagggactggaagaagctcttaagagggagaccgccagagaagaagtctctgtgatcatcacaaaggcaccctgcgtgcttttaaaagggaatgtatttaaaacaaaatgcaggccggtgtcagaaaagtgcaagaaatgcggtctttgcctgaagccaggctgtccggctctaacaaaactgccggatggaaccattgcaattgacgaaaccatgtgcaacggctgcggtctgtgcaggcagctgtgccacagtgatgcaatagaggaggtagaagtgtaatatggcaacgaagaatattatgatagtaggtgtgggcggtcagggtacacttctcaccagccgggtgttgggaggccttgcaattcatgcgggatatgatgtaaaattatcagaggtacatggtatggcacagcgtggaggaagtgttgtaacttatgtaagatacggagagactgtggctgaacctatcgtagaagaaggtcaggcagatgtactgattgcttttgagagactggaagctctccgctatattcattttctaaaagaagatggagtattgattgtgaacgatcagagaattgatcccattacagttgtgacaggtgctgcagaatatcctgagggaattctggaggggctgagaaaagaacacaaggtatacgcagtggatgccatgaaagaagcaaaggatatggggaactccaaagtgtttaacattattgtgctgggggtagccgcacagcacatgaattttacaaaggaagactggctgactgtcattgagaatacagttcctccaaaaactgtggaaatcaataaaaaggcatttatgaaagggtacgagctggcctgagaatgtaaaatacaggagaggaggcatccgaatgattaaacaggtatctgtttttatggaaaacagaaagggacgtctggaaaaagtgactgctatcttaaaagacaatgatatcaacattgcatctatcagtctggcggataccagcgaatacggtttgctgcggctgattgtatcggatcccgataaggcacagaaggtgctgaaggagaatggattttctgccatgctcacagaggttactgctgttaggattccccacagaatcgggaagctcagcgagcttctgaagcttttaagggaggcggatctgaatgtggaatatatgtatgccctgagtacggaaaaggacagaggggctatgattatgaagacatccgatatccccaaaggggaagagaccctaaaagcaggcggtatggaagtaatggaagaagacgaggcatacgctctaaatatctagaaagaaaaagaccgggtccaagaagtttcccttgacccggtttcttttttatagtataatttaacgagttaaagcgtaacggtttaaagcgtaacggtttaaagcgaacaaaaagggagaatggaaaaatgacaattaaagtgatactgctgattttattttttggaagtatggtggctgttggcctgtattccagaaaacatgctacaaatgtgaatgatttcgtgctgggagggaggagtgtggggccctggcttacagcctttgcctacgggacttcctatttctcagccgttgtttttgtgggttatgcggggcagtttggctggaaatacggagtctcctccacctggataggactgggcaatgctattatcggaagtcttctcgcctgggtagttctggggagaagaacaagggtaatgacaaagcatctgcaggcagcaaccatgccggattattttgggaaaagatttgacagtgatactatgagggtggtggcatccgccattgtatttgtttttctggttccctatacggcttctatctataacggattgtcccgtctgttcgggctggcttttgatattccctatgcagtatgcgtaatcgcaatggcggctctgaccggagcatatgtaatcctcgggggctatatggctactgcgatcaatgattttatccagggcataattatgctgatcggaattgtggccgtggttttggcggtactgggcggtcagggaggatttatggaagccatgagaaagctgtctgagataccgagcgacgttcccgcaacggctggtcagatgggggcttttgcctctttcttcggcacagatcctttaaacctcttgggagtagtcattcttacctctctgggaacctgggggctgcctcagatggtacataaattttatgccattaaaagtgaaaaggccgtaaccaccggtacggtgatctctaccctgtttgccgttgttatctcagggggctgttactttatgggaggctttggaagactgtttgacgacccttctttctatgggcctgacggaagcattatctatgatggcattgtccctcatatgctttccacactcccggatatgctcatgggaattgtaattgttctggttttatcagcgtccatgtccaccttgtcttccctggtgcttacctctgcatctaccctgactctggactttttgccaagaaaggtgttcaggagcataggggaaaaaaggcagctgctgtttatgcgtctgctgatccttgtatttatcgcggtttctgttatcctggcattagatccccctacctttattgcacagcttatggggatctcctggggcgctcttgcaggtgcttttctggctccgtttttatacggcctgtactggaaaggcgttaccagggcaggggtatgggcctcatttatcacaggcatcggaattacggttaccaatatgtttttccactatattgcatctcccattaatgcgggtgcaattgcgatggtggtaggctttatagttgttccggcagtcagcctgatctccccgaagattgagagagagactgtggagaatatattccggtgttacgatgtggaggtggaggcaaccaccaaaaaggtactgccggaggaaaaggaaagctggaaagtccgcacataagccaaaaataaggccgggaggtgtttctcccggtcttattttttccccttgtgtttctctgttgctctgctataatgaagatacaacatcctgggaataattgaacaaaattattacacaaaggatattgataaatagtatagaagttgctattatagattactagggctgtcagtaaaatgacagctgttttcccgacagccagactgtaattaacacgggaaagcgaaatctacggaggagaaaaatgcagataatgattgtgggctgcgggaaggtaggatatactctggcagaccagttgagcggggaggaagaccataatataattgtggtagacaggaatccagaccggatatcccgggttacaaatgattttgacgttatgggatacgtgggagacggggcaagctatagtgttctgaaagaggctgatattgacaacacggatctgctgattgcagtgacagattcagacgagagaaacctgctctgcagcctgatcgccaagaaggcgggaaactgcaaggcgattgcaagggtgagaaaccctatctacagcagcgagggagaattcctaaagagggagctgggcctggcaatgataattaacccggagtatgccgcggcatcggaaatggcccgtatttttcggttcccttccgccattaaaatagatacgtttgccaaagggcggattgagcttctgcggttccgcatccctgtgggaaataagcttcatgacacacccgtctctaatatcagaggcaagctgggctgcgaggtacttgtctgtatggtgcagagaggagaggaggtctttattcctctgggcgactttgtacttcaggagaaggacattgtttccattgtggccgccccgagcagggccagccagtttttcagaaagataggtgtagagacaaaccgggttcccaatgttcttatcgttggcggcgggaagattacattctatctggcccttcgcctgcttcatgcggggatcgatgttaaaatcattgagcaaaacaggcagaggtgtgaagaactcagtgagctgcttccaaaggccagcattatctgcggagacgggactgaccagaacctccttctggaggagggcttggagcagattcgcggttttgcagctcttacaaatttcgatgaggagaatatcctgctttctctgtttgcaaagagtaaatcaaaggccaagcttgtcacaaaggtgaatagaatctcatttgatgaggtaattgaaaatctgggcctggactgtattgtctatcccaaatacattactacggagtttattatccagtatgtccgatctatgcaggactctatgggaagcaatgtagagaatctatataagcttaacgataaccgggcagaggccctggagtttttaattaaagaggagtcgcctgtggttggaattcctctggaaaagcttcagctgaagaagaatatactgatatgtggaattaaccggtacggaaagattattattcccggcggacaggataagatcagagtgggagactctgtgatcgttgttgttacagattacagaatccatgatatcctggatatattggaggactagggcaaagattatgaattacggaatgattctatatatactaggatggatacttaattttgaagcagcttttctgactctgccctgccttgtggcagtattgtatcaggaacaggatggattctcctttctgggagtggcagttttatgcctcatcataggatttatattctcccataaaaagccggccaatacttcgctgtacgcaagggaaggctttgtgattgtatcggcaggatggattgttatgagcgcttttggcgccctgccttttgtgttgaatggggatattccgtcttatgtggatgcacttttcgagacgatatctggttttactactacaggagccagtattctgacagatgtggaagccttgtccaaggccagccttttctggagaagttttacccactggatcggcggtatgggggtatttgtctttattctggcgattctgcctttggtgggagggttcaatatgaacctgatgaaggcggagagccccggcccttctgtggggaagctggttcccagagtgagaaatacagctatgattttgtacggcatctatttcattattactgtcgtagagtttgtcttgctggtagccgcaggtatgacagcttttgacgccattacccatacattcggaacggtaggcacagggggatttggaacccattcagacagtctggcggggttttccccggcgattcagaatattgtaacggtgtttatgatactaagcggggtaaactttggtgcatatttccttatcattcacaaaaagccgagacaggtcctgaagatggaagaggtgagaatgtatctgggaattatcctggcaagtgcgctcctgattgcttttaatgtcagggatatgttcggcagctggggagaaactctgcggcatgcatttttccaggtgggctctattatcactactacaggatttgccaccgtggactttgacctttggcctcagttttctaaaaccattttgattatcctgatgttcgtgggcgcctgtgccgggagtacaggaggaggcatcaaggtatccaggattaccatcctgctgaagacgattaaaaaggaactgagaatgatctcccatccccggagcgtcaagaagattgccatggacgggcacaggattgaacatgaggttgtgcgatctaccaatgtttttattgctgtgtacttcctggtattttttacctccgtgctgcttctgggaatggatgagctggatttcaccacgaattttacagcagtggcagcgaccctgaacaatattggacctggcctggaactggtgggccccacgcagaacttctctattttttctgcaccggctaagtttgtgctgatgtttgatatgctggctggacgtctggagctgtttcccatgctgctgctgtttgccccttccagctggaagaaatattaataatgaaaaagcaatagcggtgatgcacacaggcagagccgctatttgtgatctcataaaaggagaaagattttgcatgtgtaaggggagtttgctataatcagatgcataggggggttacagcgtatacaggaaggggttagacaagatgaagagagcagacagaaagagaaattttgccaggatattctgccttgtgctgcttgcttttcttttaggcggtatgggacaagattgtgtatgggcagagacaggagacacaggacagacagaagagacgcaggcagatggtcctgaagagggagacgtgacaggccaggctccggaagagacacagccgctggaggcagaaaacagagtgctgaccataggatggatacaggagggcggtacctggtattattataattccaacgggaaattacatacaggctggctggaggagaacggcagctggtattatcttgaggaagacggaaggatggctgttggctggagatatatgaaggagcaatggtactacttttccacatccggtgtcatggttgctgagcagtgggcgggagattattaccttacagcaagcggtgcaatggcagtgaatgcgtggattggaaaatattatgtgggcagcgacggcagatggattccgggatacagccaggcccagtggatgcaggagggggaacgctggtggtataggaacgcagacggcacatatcccaaatcctgctggaaaaccatcagcggctctgcctactattttaatgaagcaggctggctggtgactggctggttaaaggatcagggaaagtggtattacctgacagaatatggtatgaaaaagaatgaatggctgtctgacgggaaaacctggtactatcttaccggagacggaagtatggctgtaggctgggtgatgaccgggggagcctggtattatatgaactccaatggtgtgatgcagacaggctggcagcagatacagaaggaatggtactatctgaaggaaaacggtgtgatgcagactgggtggctgttccaggggaaaagctggtattatctgaagagcagcggagccatggctacttcctggcagcaggtaggaaaaacctggtattatctgtcaggaagcggtgtgatgcagacgggctggcagcggataggcagagactggtattatctgaaggcagacggtgccatgcagaccgggtggctgttccaggggaaaagctggtattatctgaagagcagcggagccatggctacttcctggcagcaggtgggaaaaacctggtattatctgtcaggaagcggtgtgatgcagacaggctggcagcggataggcagagactggtattatctgaagacagacggtgccatgcagaccgggtggctgctccagggccagatctggtattatctaaagggcagcggcgctatggctacaggctggcagaaggtcggcagtacctggtattatttctacggaagcggtgccatggcagtgaatacctgcatcgacggttatctgattaaccggaaaggggaatactacgaaccggctctgggaaccataaaagggctgcttcagaatgccatggttccggtaggttctaccatgtatgtgtacggaggcggctgggatgaggatgccacaagaaaggggccaagtccccagtggaagaagttctatgaaaagcagaattcctcttatgattacaataccacaagatatcagtcagagaatggactggactgttccgggtttgtaggctggtctgtctacaatgcgttaaataaagtgagcgggaaaagcagctgcacagtaacctccaccgctatggtttccaattatgcgtccagaggctggggtaccaaaattgatcgatcaaaagtgaaggactacagggccggggatgtgatgggctctacctgcggatgtcataatcatgtatatctggttatcggccagtgctctgacggcagcgtggtctttgtacattcttcaccaaagggggtacagattaacggtacgacgacgccttcggggagttactccagcaaggccatatctctcgccaattcttatatgaaaaagtattttccggactggaataagaagttcggcaattcctcaggtcctcagtattatctgagtcatttcagccagatgcgctgggatatatcaggaaataaagtaatgagggatccggagggatatacaaagaaaagtgcggagcaggtattaaaggacctgtttgaagaataaaagtaatagtgtgctgtaggaaaggaattgagacagatgaatgataaaagagtgtttttaattgtactggacagctttggaatcggagaagagccggatgcggatcttttcggggatgtgggaagcaatacactgggaaccattgtaacatcggccagatatgatactccgaatatgagaaagctgggactttttaatatagaaggcgttacctgcggtaaacgcacggaacaaccattgggttccttcgccaggatgcaggaagcctctatggcaaaggatacaacagccgggcactgggagatcgcaggtctgatatcagaaaagccttttcccacgtatccccatggatttcccggggaagttctggaagcattctccaaagccacagggagaggcgtgctgtgcaataagccatattccggcactgatgtaatccgggattacggggaggaacatatgaaaaccggggattatattgtctatacttctgcagacagtgtattccagattgccgctcacgaagaaattgtccctcttgaagaactgtatgaagcgtgccgtaaggccagggaaatacttcagggagagcacggtgtgggaagagtcattgcccgtccttttataggaaaggctccggattttaagagaacaccccacaggcatgatttctctctgattcctccgaaggataccatgctggactgtctgtccagggcaggtctggcaacgataggggttgggaagatatatgacatttttgcaggaaaaggtgtctctgagaccaaatccactgagagcaaccagaatgggatggaaatcaccgcacagtggcagagcacatccttcaacgggctttgctttgtaaatctggtggactttgatatgctttacggacacagaaatgacattgacggatatgcaggggcggcgactgagtttgaccggtggctgggcggattcctggatggaatgcgagaaaatgatatcctgatgattaccgctgaccatggctgtgatcccggaactgccagcacagaccattcaagagaatacaccccccttcttgtctgtgggaaacatgtgaaaaaaggggtttctctgggtacaagaaagtcatttgcagacattgccgcgaccattctggatatcttccaggtggagggaaggatagcaggcacaagttttctgggagagatagaggcaaaggatggagaatagggtactgattgaaaaagctctggccgccagggagagggcatacgccccttactcggaattccgggtcggggctgctcttctcacccgggaagggaaagtctacacaggctgcaacatagaaaatgcggcctatggaccaacgaactgtgcagagcggacagcattttttaaagcggtttctgagggggaaagagagttcaccgccattgctgttgtaggcggaaaacaggatcagaccgggaaggaatactgtttcccatgcggtgtgtgccggcaggtaatggcagagttctgtaatggaggctttcggattctggcggccaaaagtccggaggactacagggaatataccttgaatgaactgcttccggagcggtttggaagcaataacctttagatatgggaaaggctggtggaagtatgagaatgacggatatcattgctgcaaaacgggatgggcaaatactatcggaggaacaaatccgggatatgataggtcggtatgtaacggatgaaataccggattaccagatgtctgccatgatgatggcaatctattttcagggaatgacagaccgggaactgacagttttgacggatgctatggctaagtccggtgatatggtggacctctctgagattaaagggattaaggttgataaacactccaccggaggagtaggggataaaactacgctgattgtggccccaattgctgccgcctgcggagtaaaggtggcaaaaatgtctggaaaaggattgggatttaccggcggaaccgtggataaactggaatctatccctggatttcggacggtactggaccggaaagaattttttgatgtggtaaaccggaccggattgtctgtcattggtcagtccgggaatctggctcccgcagataaaaaactgtatgcactgagagatgtaactgccacggtggagagcattcccctgattgccgcgtctatcatgagcaaaaagctggctgcgggcagtgactgtattcttctggacgtaaaaacaggaagcggggcctttatgtccgggcgggaagacgccagggcgctggcggaaaaaatggttcggatcggcacaatggcgggaagaaaaaccattgccctgatcacaaatatggaggaacccctgggaaattacatcggtaatgccctggaagtcgaggaggcggtgaaaacgctgcagggcagcgggccggaggatctcacagagctttctgtggaactggccgcaaacatgctttatcttgcggaaatgggggaactggagatttgcaggcagcaggcagccgcagctctgactgacggaactgccctggaatgtctgaaggcaatggttgcagcccagggtggagaaccgaaggtcttatctgacatcagcctgctgccaagagccgcgtattcccgggaaataaaggcgaagacagagggctgtatctccggcctggatgccaaaatgtgcggaatggcttccggacttctgggggcgggcagagagacaaaggacagtgtcatagaccctggtgccggcatcatccttcataaaaaaactaatgattatgtaacggaaggagagccgattgcaacactttattcatcaaaggaggaactttttccggaggctgtcagtatgctggaaaaggcagtgacgttgggagaggcgccgaaaggcaaaaaacagatgatttttgagagaattgtctgattgtgcagcggtattatatatagaagaaaggggaagcaatgagcagaaaagagtcggaaatattaagttatgtggatcacacccaattaaaggcatttgctgtgtgggaggacatcaggaagctgtgtgaggaggcggtggaatgccgtacggcgtctgtttgtatcccgccctgttatgtaaaacgcgtcagggagtcatatgggaattctcttactatatgtacggtagtgggattccccctgggctacagtgtgaaagaggcgaagctctgtgagaccagacaggctctggcagacggcgcggatgagattgatatggtcatcaatatcagcgatgtaaaaaatggaaaatttgaagcggttttggatgaggtaaaaacccttaaagaggctgtgggcagcaagatactcaaggtgattgtggagacgtgctatctgacaaaggaagaaaagataaaaatgtgtgaaattgttacagccgccggcgcggattttataaagacttccacaggctttggcacagggggagcaaccatagaggatgtggtgcttttcagagaaaacatcggggaaaatgtaagaatcaaagccgccggaggcgtgaagacgagagaggacttggagaagtttctggacgccggctgcagcagaatagggaccagttcagctgtggggctgcttcatgggacaccagaccaaacatattaagaaatgcacacaaatgttacatgaatattaaattttggttgagatttttagatctttttcttgcatatacttaggatgtgtggtaatatgtaaaagaaatgaagaaagtatttcataaatattaaacgtaacacgtagaaatctcaagagggaaatgagaaagcaaaaatagtgtacatacttagatgagaggttaaacggtattatgaagaagaaatttattggagtaagcttagcaatcgtacttagtatggctcagattatttctgtaggagctgcaaaagaagatgacattaaggctgcaaaagcgcagacaagcagtcagctggctgcagtgaataataagattaataagttagaagatcagaaagcagcattaaaagctgagattaatgaattagatcaggatctggtagaggtaattgtccagatagatgttttaaaggatgatatcaccaccaaagaatctgaaatcgaagatacaaaagaagatttgaaagtcgctgaagaaaacagggacgagcagtatgcttccatgaagaaaagaattcagtacatatatgaaaaaggcggcgacagtgcatgggcacagatgcttttagaggctgacagtctttccggtatgctgagcaaagctgagtatacacagcagttatatgattacgacagaaacagcctgaatgagctgaaagaggtagttcagcaggtgactgaccttgaaactcagttagagacagaaaaggctgaactggaagacatgcaggttgaatatgaaggccagcagaaagaactggaatcaaccttagagcagaaaaaagccacagcaagcgactatgaatcacagatttccagagccgagtcacaggcagctgaatataaagatttaatccaacagcagaatgcagaattgcagaagattcaggaagaaaaggccgcagctgctgcagcagcaaagaaagcggaagaagaggcacagaaaaaggcagctcagaaagcagcacaggaatcttcctctaagaaagattcggacagccagaagagcgatgacaataagtcctccgataattctaaaaaagataataacagtagcagcaacagcagcaatgaggatacagacgaagaagacagcagaggaaattcctccaacagttccaaagatgaggaagacaacagctctaaaggcgatagcagttccaatagctccaagggcgacagcagttcagattcttccagcagttcttcaggatcatcctccagcagttcaaacagcgctactggacaggcaattgttaattatgcaactcagtttgtgggcaacccatatgtatggggcggcgagagtttaacaaacggtgctgactgttccggattcaccatgcaggtatatgcacactttggaatctccctgccacattcctctggagcacagagatcttatggcagagcggtatcttatgcagaggctcagccaggtgacctgatttgctattccggacatgttgctatctatatgggaggcggtcagattgtacatgcttccaacagtgccccttatccaaagggcggaatcaaaatcagcggaaacgctgcatataagacgattttatctgtaagacgtcttgtataatacatagcagatttactgccgtttatggagctatccatgaacggcagtttttttgttacaaaggaaggcttttgcaggaaactgccctttaagatatatcctcaggtataaaatcaactttctctggtgtacactatgacagtgaaaaatatttcgggaaaacaaaaaaaatacttgctttttcaaaaaactatgttatagtagttatagaacaagcgaataaacaatgtgtttgagataaacgatatggaggcgattttatgaatattagtaaatttacacagaaatcacttcaggcagtgcaggatctggaaaagacagcctatgaatttggcaatcaggaggttgagcaagaacaccttttgtataatctactgcaccaggatgacagtctgattctgaagctgattgaaaaaatggagattaataaagaacatttcctaaacaatctggagaatgccttgaatgccaggacaaaggtgtccggcggccagccgtatatcggccagcatctgaacaaagcgctggtaagcgcagaggacgaagctaaggctatgggggatgagtatgtatctgtagagcatctgtttttgtcccttttaaagaatgcaagtccatctatgaagaaaatatggaatggatatgggattaccagggacaggtttctccaggctctttctacggtcaggggaaaccagagagttactacagataatcctgaggcaacctatgacactttgaacaaatacgggcaggatctggtggagaaggcgcgaaaccaaaagctggacccggtaatcggcagagatgcggagattcgtaatgttatccgcatactttccaggaagacgaagaacaacccggttttaatcggtgagccaggtgtaggtaagaccgcagttgtagaggggctggcacagcgtattgtaagaggcgatgtgccggaagggctgaaagacaagaaaattttctctctggatatgggagcactggtagcaggcgccaagtacagaggggagttcgaggagcgattgaaggctgttctggaggaggtcagaaaaagcgaaggacaaatcattttatttatagacgaactgcacctgattgtaggcgccggaaagacagacggagccatggatgccggcaatatgttaaagcctatgcttgccagaggagaactgcactgtatcggcgcgaccactctggatgaataccgtcagtatattgaaaaggacgcggctctggagaggagattccagccggtaatggtggatgaacctacggtggaggatacgatttctattctccggggactgaaggaccgctatgaggtatttcatggggttaaaattacagacggtgccctggtggcagctgctaccttatcggatcggtatatttctgaccggtttcttccggataaggccattgaccttgtagatgaggcatgtgctctcattaaaactgagctggattctctccccacagagctggatgagctgcagagaaaaatcatgcagatggagattgaggaggcagctctgaaaaaggaaaccgataagctgagccaggatcgcctggaaaaccttcagaaagaactggctgattacagagatgattttaacgcccgtaaggcgcagtgggataatgaaaaggttaccgtggagcgtctgcagaagctgagagaacagattgaagagatgaacaatcagatccagatggctcagagaaattatgacctggagaaagcggcagagcttcaatacggagagcttccaaagctgcagcagcagctgagtatagaggaggagaaggtaaggaagcaggatctttcacttgttcgtgagagcgttaccgatgatgaaattgccagaattgtatcccggtggacgggaatacctatttctaagcttacagagggtgagcgcaccaagatcctggggctggaggatcagctccatgagagagtgattggacagaacgaagcggtgagcaaggtgacagatgcgattctgcgctccaaggcaggtattaaagatccgtcaaagccaattggttccttccttttcctgggtcctaccggtgtgggtaagactgagcttgcgaagactcttgcagcggcactcttcgatgatgaaactaacatggtgcgtattgatatgagtgagtatatggagaaatactctgtatccaggctaatcggagcacctccgggatatgtgggatacgaggagggcggccagctcacagaagccgtgagaagaaagccctattcagtagtactttttgatgaaatagagaaagcgcacccggatgtgtttaatgtactacttcaggtgctggacgacggacgtatcacagattcccagggacgtaccgtagactttaagaatacgatccttattatgacatctaatataggctcaacctatcttctggacggcattcagtcagatggagaaatcagcccgcaatgtgaggaaatggtgcaccaggatctgagaaatcatttccgccctgaatttttgaaccgtctggatgaaattattatgtttaaaccgttgacaaaagagaatattggcggtattgtagatttgcttatcaaagagctgaaccatcggctggcagatcaggagttgtcgctggagcttacaggtgaggcaaaggcttatgtcatcgacgggggatacgatccggtatacggagcacgtcctcttaagcggtacctccagaaatatgtggagacactcagtgcaaggctgatcttgtccggtgaaatcgatgcaggggacacgatcctgattgatgtggagaacggggagctggtggctaaagtaaaataatactgagaaagcaggcaaggagtgaaactatgctgccaaaagatccggcaattttgctgagttatgtgaatacacagctgagagatcattactcttccctggaagacatgtgtaagagtctccaggtagataaagagggcattaaaaggaagatggaaatgatagactacgaatatgatgcccaacagaatcaatttgtgtgatgccaaacagggcagccgcaccggtatgatagtagataccggtgcggctgccctgcaattgctatattgttctatttcaaatcacagccaatttcttttaacttttcatccacccatggtctgatatacgttccttcatttattatatcatccatgatagcggcctcctttttcgctatttcccgggccgcgtccgcaagttttgaggcaactgccggatcgatgacaattacaccgtcatcatcgcctacaataatatctccaggattgacaagctttccgccgatgactaccggtacattgatttctccgggtccatttttatagggaccgtttggatttaccccccgtgcataaacagcaaaatccgtcattgcagcgagtccgccatagtcccggattgccccgtcgcagacaattcctttaatccctctggtcttacagtaggttgccatcaattcgccaaatattgctctgtcagtaaaaccacctgcatctatgacaatcacatcccccggctgggccaaatccatggcggcatggaacatcagattgtctccttggggcacacgaactgtaaatgcagtacctagtaactgccctttatagcccaccggtttgattccggaatccacggccgcaatacgccccatacaatcatcaatatttgccgctggcatatttctgaaacgttctaccagttcctttgccggacggctgatttcctttataatcttacacccaattgacatttatttttttctcctgacatttattttttatacaaattgatatcctgtatctcttgcgagcacactcctgttggcaacgttatgggatagcacagttccatcaacaattgctgacggaatcaaatgacataccatttgaatctgggttttcttcgccccgatgccataagatccacagtgaggatttatgataacattatccatggcaagaaggggatcctccttagcaatgggctctatttccacggtatccaggccggcataaagaatttcgccgttttccagtgcccatgcaaggtctttctgtgaaatgacaggcccacgggaggtattgatgatcatggctgtatttttcatcttgcgaaaggtctccttattaaaaacatgagtggtttcgggtgtcagattcacatggatggaaatgatgtcactcttttctaacatctcgtcgaatgtcacaaattccacatgaggatactgttcctttactgagtctgaaacatacgggtcgcaggagattaccttagtcccaaaacctccatggaaaatatcatgcaaatatctcccggccgctccgaatccgtacaaaccgagagtcatttcccggacatcccccggaagcaggtactggcatttgggccactttcctgtgcggatttctctgtcataataatttgtattgcgaacaagccccataatcatcgcagttgcaacatctgccaactctttcgcacaaaaacccggcaggttcagcacaattaccccctgttctgtggctgcatccaagtcaatactgttgacgcctacgccaaaccgctgtacaaactttagctctggcaaggcttctaagaccttgcgggtaatggggggattaccggtagccagaatagcatcggcacctttgcatcctgcgataatttcttccacagtgggttctttctgctgtgcagccacaacctggtagtccagcagggccagctcgattccggcagcctgataagcagctgtaacacgctccagctcttcggcagttacgctgccataatctttatctacaacaacagctctcatttcttgtctctcctttatttactttttataatggccagaatactggtattagaagcaatgatccaatcagtgtcacaacggtcagcccgatacccggaacaaagaagtcacggaatcccagatttcccggtttaataattaatgtatttgtaccggaacccaccggagtcaaaaatggcgcagaggccgcaacacagatggcaacgccaattgccaccggattaatacccatttccatagctaccggaacaaataaaggtgttaccaatactacagtggaggtattcatcatcatgttcgtcaaaattattgtgacaagcagtacaaaaaataagaacattactttattcggatgattgcccaggattcttaccacagcattagcgattaaatctcctgctccgctgctggccatcgctttggagaccgcactcataccgcctacaataaacagagttggccaatccacagcccgcatggcttctttttcactgatacatcctgttccgatcagaagtacacatccgatcgccgcgataaaatacattggccattcatcgcttgcaacagccatagcaatcagaactgccgctaaaattgtaagacagattcccccttttacaggattgaattccgttgccttttcccttcgcgtatactcttttaaatattccggatcggaagaatctccgggtgtcagaagctttttgccaatggacagaaagtagaccagaaacaggatacaaaggggaaatcctacctttcccagctcaaaaaagctaaggaaatctactcccatatcttcaattaatccggcagtgctgacattacttgctgcccctaccagcgttagattgcatccgatagatgccgcaaaagacatcggaatcaactgtctggataccgaaaccttggcctgcatactcatcgctacaacgattggcagcatcatagctactacaccaagtccggagcagatagaagaaagaatcagcgctaccagaacagccgctatcataatgcccttttctgacgtgccggttatttttaccagcatatgcgccattttatctgctactcctgtgtaaaaaagtgactgaccgataatcatcattgctgccagaagtgcaattgttgatccggaaaatgaggcaaacacatctgacttatcaatgattcccatgcagcccagaaggattgcgcccgccatagatacaagccccagggggaatttatttgttacaaaaaatacaaccataattgccaatacaatcaatgttataattgctggattcattatatacctccaaatacagttctcccataatttttttgttatgtataatacttgcttttgtgactaagactgtttattgtgtaagttatatgcgcatccttactgtacttttataatattctattttattgacaaaagcaaatggcaatagtactatatagattataatgtttctgttatatagcaaaggagtgcttatgaatcataattacgaatactttacttccattgtggaagccggcagtctgacgaaggccgcccaaaatctttatacgacacagcctgccctgagccagtatctgaaacgtctggaaaacaacctcggtgtggaattatttgaccgaagtacttcccctctcaaactgacttatactggcgagtgctattataaatacatactgcagatgaaaacgttagatgaaaatctgagaagagaatttcaggatattaaaagtgaggtgagcggtcgtctgcggttaggcatcgccctctggcgcggcgcctgccttttgcccgacattttcccggaatttcaccgccgttatcctaaaattcatattgaattgtttgaaggacgctccaaccaactggaaagcgccctcctcaatgacaatatagatcttgcggttatgaatcttccgcacacattaaattacaataaactgacttgtgaagcaatttttgacgaaccgattctgttagctgcacctacgaatcacccttatgtgcagactctgctgcaggactgccgctatcagggcaggtttcccctggccccccttgcgctggtcaaaaaaatacctattatattaacaaagcccggtcaaaatctgacctatgaggttcagcaaattttagcaaaaaatcaaatagaacctgatatcctgctggaaaccggtaatttgactaccgctatcaaccttgtttctgagggaattgcctgcacattcgtacccggcgaaggtgcaggtgtctgccgccattcggggagagtgacttattttatgctggatgacagcagtgcaagttgggatcttggggttgtataccgcaaaaatagttatctgcccaaggtatcccaattgtttatttccatattaaaagagatttttggcagcaatagatgaataaaagtgttccgggaattcggttgctgtatctgtctgcttcacgatagactttgtattttctcccgatagattctcctaaaaagcagcgtggacagagccacggatactaattctgcaagaggaaatgcccaccacactgcgtgcagcccaaataccttagcgaagaggtatgcacagggaagtattaccagcatctgccttgccacagagacaataagactgtaggtaccgtttccaagggcctggaacgctgagccaactacgatgcagtagccggcaaatataaaactgagactgataatgcggagcgcgggaacaccgattgccagcatatcctctgaggcattaaatagagataaaaactgccccgggaagacctcaaaacatacaagcccaagtaacataatcgtgactgctgagaggatactgaggcgtatggtagacataatcctctttttgcttttggctccgtaattaaaggcaataatgggcaccatgccgttgttcagtccaaatacaggcataaatataaaactctgcagcttgaaatagatcccaaatacagcggctgctgtagaggtaaacatgagaagaatcttattaatgccaaaagtcataacagagctgatagcctgtaccaccatagaaggaattcctaccgcataaatctgccgtatcacacgggaatgaggacgatagtgtctcatattgatattaatttctttattatatttcacattcagaaacaggcccagcagcattccgatgatctgaccgaaaactgtggcgatagccgcacccgctacctctaaccgcggaaagccaaataacccgaagataagaatggggtccataattaaattgacaattgcaccaactccttgggttaccatggagagcgcagcccgcccggtagcctgaagcagacgttccatagtgatttccagaaaaattccgaagctgaacacagagatcagggacatgtattgaatcccataggcacggatctgctcgtgggcagtctggagatcaaaaaaagcagtggccagtgagacgcccagaattgcaaaaacaatataatggcagacagagagaaagataccgttccttcctgccagatttgctccctcataatccttttctcccagatttcgggacagaagtgcattgatacctactcctgtccccacggccaccgcaatcatcaaattctgtatggggaataccagagacaccgctgtaagtgcactttcattcagctgggcgacaaaggcgctgtctacaatattgtacagagcctgaatgagcatggagatgattatgggaagcgacatttggaataatagcttagggataggcagataccccattttgttttcttttggtatggtttgtggcataattttttctcctgttaactaggtctaaagcgcaaagaaatcggatgtacggctgtggtatggaaagccggggcatccgatagtgataagtatataatttattgtatagagggttgggggaaaagtcaactgtttgtgtgggaacttgggatttagtggtgtaactgggactttggttcaagatgcttcaagacggcaggtgtgggtggcagggggacggtgagagaaatcccgcggcagcgggctggctggttcgtacgggaggaaggcttaagttccggggacacctccgtcgcgaagagagtctaagacaaaaccggaatccccgccggagcaccgttcgtatgtgcaaagaatgccttatgtgcattctctgcccatgctcactttttttcggccctgactgccgaaaaaatctccagcgtgaatcccggttttgcctaagactctctagtcactcctgcggaatcgtccccggaacttaagcctccctcccgcccaaaccagccagcccaccaccgcaggattcctctcacctgggtaaggggaagttccagggggttcgctatttatccaaaacatcaagcggacaatagtgcgaaataagaggaaaagtgtacaactctcaacctttcccccgttttctatatttctgaagtgagggtaaaccaggtcaagggagggggtcttggcgccgaggacaggcagggacaatacgtagatctgcgcagactacggagtgcgtccgaagatccactgccagcggtcacttaggagcgaaggctctcctgagcttcttagtgaacggctaagcagttagctgaggagaaacgcagtagcaagtagatctacgtattgtccctgcctgtcctcggcgccaagaccccctcccttgaccgtccgtcagcgacgctctgctcgccgactctatacctccgaactttaggcatataaactataattttcttgcacttaccacaaaaacttgatactatgttatgagaaaaatacgataaaaaagaggcgaatctaatgtccgcataccaaagttttgcaagggtgtatgatatgtttatggataatatcccctatgaagaatggggagagtatgtgagcagtctgttaaaggaatatggaattgaagacggtctggtgctggagctgggatgtgggacggggagtcttactcaggtgctggcggggatgggatatgatatgattggcgtggacaactctgcggacatgctggagattgcccaggagaagaagctggagagcggactggatattttgtatctcctgcaggatatgcgggagtttgagctgtatggaacggtaagggcggcagtgagtatctgcgactctatgaactatattttagaggaagaggaactgctggaggtgttccggctggtgaataattatctggatcccgggggaatctttatctttgatatgaatacccggtataagtatgaagaaattttgggagagaatacgattgcagagaaccgggaagaggggagttttatctgggataattattatcaccgggaggaagagatcaatgagtatgatcttaccctgtttattcccgagggaagggaatcccttttgtatagaaaatatcaggagacacattatcagaaggcctacgctgtgggacgggtgagagaattgctggaagaggctgggcttcagtttgtcagtgtgtatgaggcatttaccagagaagaaccggacagtgggagtgagagagtttactttttagcccgggaagtggaaaaatcagtataaggagataaaaaaagtgagagattatattgtaagagcgacagcagccggcaatcagatccgggcatttgccgccacaacgagagacttggtggaggcagggagagcggctcataatacgagcccggtagccacagcggccctgggaaggctgctgaccgcaggggctatgatgggagttatgatgaagggggacaaagatctgctgacgctgcagataaaagccggaggtcccctgaacggaattacggtaacagcagacagtaaaggaaatgtaaaaggatacgtagggaatcccaatgtactgctgccggccaacaagaatgggaagctggatgtggctggcgcagtgggtgtggggcttttgaatgtaattaaggatctggggctgaaagaaccatattccggccagacgattctccagaccagtgaaattgctgaagatcttacctattattttgctaccagcgagcaggtgccctcttccgtaggccttggggttcttatggaaaaggataataccgtaaagcaggccgggggctttatcattcagctgatgccttttgcagaggaggcagtgataagcaagctggaaaaaaatctgtcccgtgtaacttcagtgactggaatgctagaaaagggctatacaccggaagcgattctggagaccttgctggagggaatggagattgaatacaatgacaggatcagcactcgtttttactgcaactgctgcaaggaaagagtggctaaagcacttatcagcgtaggaaggaaggatttgaaagagatgatagatgagggaaaagaagtggagctaaactgtcatttctgcaacaggaattatatctttgatgtccaggaactgaaagaactatatacactgagcaaataatttgcagaaagcggggaatagagatgaatcagggttttatcaaagccgcagcaggaacccccagtataaaggtggcggactgctgctacaacgagaaggagattgcaaaaacaatacgtgagatggcggaccacggagctaagttaatggttttgccggagctgtgtctcaccgcttatacttgtcaggacttgttctggcaggatgtgctaatcagggaggcagaggaacagctcctgaaactggcggaagatgtaagggacatagacggattgatttttgtgggaacaccttttgcttgtaagggaaaactgtataatacagctgctgttatttccggcggagaagttataggtattgtgccgaagataaatctccccaactactgtgaattttatgaggcccgtcattttataccgggtaacaaagaaatagaatggatatccttcggcggtaaagaaattccttttggaacaaatcagctgtttgtctgtgagactatgccggaactggtagtggcagcggagatttgtgaagatctctgggtacccaaccctcccagcatccgtcatgtgctggcgggagcaaacgtaatcgtgaatctttcggccagcgatgaggtaatagggaaagatgcctaccggaaggggctggtaaaaggacagtctgccaatttggtgtgcggatacatctacgccacagcaggcgagggggaatccacccaggatctggtatttgggggagggaaccttataggtgaaaacggtgtacttctggcagagggaacacggtttaagaatgagattgtatacggcgatctggatattcagagactgcagagtgagagaaggaaaatgagtaccttccccggagcagatgagacgggatactgcagggtgctatttagccttgaagtgcaggagactgctctggagaggacctttgatcccgctccttttgtaccttcggataagggtgacagggacaggcgttgcgaagagattcttacgattcaggctatggggctgaaaaagagactgatgcataccaactgtacccatgcggtgctgggaatctccggggggttggattctacccttgctcttttggtgactgcaagagctttcgatcttcttgggatacccaggaggaatattctcgctgttaccatgccctgtttcggaaccacagacagaacatataccaatgcctgcaggatgacaaagtgtctgggggcatccttaaaagaggtggatataaaggcttccgtaacccagcactttaaggatatcggacacgatatggaggcacatgatgtaacctttgaaaatgcgcaggcaagggaaagaacgcaggtgctgatggatcttgcaaaccaatgccagggaatggtgataggcaccggtgatctgtcggagctggccctgggatgggcgacgtacaatggggatcatatgtccatgtacggtgtgaacagctccataccaaagactctggtgcgccatctggtgcgctactacgcggacaactgcggggaagctgagctggcagctactctgcgggatgtgctggacacacctgtcagcccggaacttctgccgcccaaggacggtgtgatatcacagaagacagaggatctggtaggaccctatgaactgcatgacttcttcctctactatatgctgcgggcagattttccgccgtctaaaatcttaagaattgccaagctttcatttaaaggcgtttatgacgacgatacgatagtaaaatggctgaagaccttttaccggagatttttctcccagcagtttaaacgctcctgcctgccggacggccctaaggtaggaagtgttgcggtatctcccagaggagacctcagaatgcccagtgatgcatgtgcggatgtgtggatgaaggaattggaaaacgaatagaaagacctctgctttggcgtgcgccgggccggggacatggaaacacaagaagaaagagtctgacctgtcagactctttcttcgcatacagggttactttatctctgctttgtccagggctgaattaatggcatccaagagcagcatggaagtatatttattgtcctctgaatacgtaatgccttccgttgactgggtggtatatatctgactggcaagatcctccagggttggctccatgagcggatacattgctgtggttgtctcgctgagattgaccagagaaatggcattgatgtgatccgcatctacagttacttccacatcaaacgtattatcatttaaggtgacggaagtattgtaaacgcctgcatggaagcgcggattggagacattggcagcttcatcattctttttagaaccgaacattatgaacatcagaacagccagaacaatggcgagaacaacaaagataccggtataaataacttctttcatatgtagtactacaattttggtttttgaactcatggcaatacccctcctgatttcctttttataacttattatgggaatggggaaaatatgcaaaaaccgggcaggattgtgctataatatttaaaatattgaacatacaggaaaggaaaggtaataggatgccgttacagtttgtatttggaaattcaggttccgggaaatcctggaccctttatcataaaataatagaagaatcgatggagcatccccagaggcagtatctgattcttgtaccggaacagtttaccatgcagacccagaaggacctggttgctatgcatcccagaggcgggatcatgaatattgatgtggtaagctttgagcgccttgccttccgggttatggaagaggtaggggaagatatgggacaggtgctggaggaaacagggaaaagcctggtacttcggaaagtagcacagaagaaaaagaaagaactgaaggtattaaaggagcagataaaaaagcccggatacattgcccagctgaaatcaaccgtttcggagtttacccagtatcatgtgggaccggaggatatggagcgtatgctgcgggcggtggaagaaaaaccccagctttactataagctaagggatatccagattttataccagggatttatggattatctcaggggaacatatatcacggcagagcaggtgctggagatgctcagccgagttatctggaagtggcagcggcttgaggactgtgtggttgttctggatggattcaccggatttacacctgtgcagtaccgtcttctggaagaaatcttccccagggctggaaaggtatatgcagtcattactctggacgagaaggaggacccatacagtccggggagtccccataagctattttttatgagtaagcagaccgttcaccggcttcttcagattgcccggcgaaccagaacagaggtggagaaggaaatctgtattcgccggggaggaaagggaagattcgtacacagtccagctcttgcctatctggagcagaatatttttcgctatggcagcaggccgtatccgggtaaacaggaggagatcgagattcgaatctgcaaaaccccgcagtcagagatggaaatggcagccgatgagatccgaaggctggtaagagaagagggataccgctaccgggattttgctgtggtgacgggagatatggagggatacgccagttatgcggcctgggcatttgaggatgcagggattccctgttttttggatcagaagcactcggtcctaatgaatccttttattgagtttatccgggcggcagtggagattgccgcggaaaattacagctatgacagtgtattccgttttcttcgctgcggccttacggagctgattccggaagaggtggatcttctggagaattatgtgattgcccttggcatccggggaacaaagagatgggaggaggaatggatccgcaggtatcgggggcaggaagagggagagaccgtccaaatggagaggatccgcagctttctcatggcgtcgctgcatccttttatcagtacactgaagaagaagggactgactgttcgggagggagtgactgccctctatcagtttattgtggggtttaggctccaggaaaagcttaagcatcaggaggagctctttagaagctccggagaatatgccatgataaaggaatacagccagatctatgagattattatggagcttctggataagatggcagatgttctgggggaggaaagggttacggtgaaggaattccaggaacttctggaggcggggctgcaggaggcgaaagtgggggtgatcccgcccagcgcagatcaggtcctggtgggggatattgagaggacaagactgaaggacgttcgtattcttttttttgcaggggttaatgatggagtaattcccaagaaagaaagcggaggcggccttttgtcggatatcgacagggagtatctgagaggctccagggtagaactggcgcccacacagaaggagaatcatgacaaccagcgcttttatctgtaccttaacatgactaagccaagggacaggctgattctttcatattccagaaccaatggaaaaggggagtcatccaatcctgcttatctcatccgcagtatccagcatatttttccggagctgacccttcgggatatggaggaagagaccgggtgcctggagaacccggtaagagggctggaatatcttggcaaagggtttcgggaagcatttgaccgggaacccaggggcgactggaaggaactctggagctggtatctgcggtcgcccaattacagagacaccgctaaaaaactggcagaggcagccttttatacgaatcctcacgatcatatcagtctgagcgcagcaagggcactgtatggcaccacactggaaaacagtcctaccaggctggaacgctttgctgcctgcgcctttgcccatttcctggaacatggactgggactcagggaaagaatccagtaccagtttaatgccatggatatggggaatgttctccacaccgccctggagctttttgcaagaaagctgggacttttagggatcagctggcgggaactgggggaggaaaagcgtctgaccctggtagaggaaagtgtggaagaaatcataaacgattacgggaatacagtgcttcacagcagcgccagaaacgaatacatgatcgccagggtaaagcggatgatgaaccgtaccgtctgggcgctgcagaaacaggtagagcggggagattttgttcccaggcggtttgaggtatccttttccatggctgattccctgaaaagtgtgaacatcgctttgtcagaggaagaggaaatgaagctaaagggtagaatcgaccgtctggatacctacgaggacgggaatcatgtctatgtaaaagttattgattacaaatccggaaataccagctttgacctggtggcgctctatcacggcctgcagcttcagctggtgctgtacctgaatgcggctgtggagatagagcagcaggagcacccgggaaaggaagtgaagccggcgggaatattttattataatataaaggatccggtagtggacaaggtccccggggagtctttggaggacctgaatgagagaattttaaagaatctgagggtaaacgggttagtgacaggggaaaaggaaatcctggagagaatggaccagggattctccggccctcccccctatatctcttccgtggtccctgcggcgtttaataaggacggaagtctttcaagaacctctgcggcagtgaatgactaccagtttggtattctcagggaatatgtggataaaaaaatcagggatatcggaaccgatattctaaaaggcattgttaaagtgtccccttatcagctgggacagaagaatccatgtacctactgcccttatcatggagtatgcggctttgacgagaagatacccggttattctttccgccgtctggggaccttgccgtccgaggaattatgggaaaaaatgaaggaggaaatgtagatatgggagttcagtggacaaaagagcagcggcaggtaatagaacttcgaaatcgcaatattctggtaagcgcagctgccggatcagggaaaacagccgtactggtagagcgaattatttctatgattacggatccgctgcatcccatagacatcgataggctgctgattgtaacatttacaaaggcagcagcccaggagatgagagaacggatcggggcggcaattgagggatgcctggaggacgaacctgggaatgaacaccttcagaggcagacatccctgattcacagtgcccagataatgacaatagacagtttctgctcttatgtagtccgcaattattttcatctgacggatctggatcccggataccgtatgggagaagagggtgagatgaagcttttaaaggctgatgttgccgcagaagttctggaagaggcttacgccgggaaggaggaggactttttagagtttatagagtcctattccacaggaaaaacggacgaaggtattgaggaaatgatactgaagctttacgaattttccatgagctatccatggccgggagagtggcttcgggcctgccggcaggcataccgggcagagaatatcgaagaactggaaagctctccgtttatgaagattctggcctgtgacaccagacatgtgctggaggaggggaaggagattctcaggcaggcagtccggattgccgggggggaggatggtccctatatgtatctggaagcacttgaatcggacctcagacaggtagaggctttgctggcggcagagacttaccggaagcggtgggagggattcagcaaactgaagtttcagcgcctttcctcaaaaaaggacaaaacggtatccgacaattccagagagttggtgaaggagctgaggaatcaggcaaaggaaagtctaaaagaacttggggagcagtattacttttctgaaccggaggaagtgattcagaatatccgtcaggccgctgtgccggtacaggtactcatagaccttacgcttagatttcaggccgcatttgccgcaaaaaagagagaaaagaacatcctggatttttcggatttggaacattttgcccttgacattctagtggaacaccggacggagggggatgtgccaagcggggcagccggagaactggcggaccggtacgaggagattctgatagacgaataccaggacagcaactatgtccaggaaaagcttctgaccagtgtgtccaggctggcccagggaaggtataatctttttatggtcggggatgtaaaacagagtatctaccgctttcgtctggcacggccggaactgtttatggaaaagttccacagatatacacttgaggacagtgaatgccagaggattgacctgcacaagaatttcagaagcagaaaggaagtgctttcaggtgttaactttatcttccgccagattatgggggaagaactgggtggggtggaatataatgatgaggcggccctgtatcccggcgcatcttttccggaaaaaacagatggggaggagtttctctccccagaggttctgctggtagaaaaggacgataaagagtggagagagatggagtctgaggagaacgacagagagctggaagccagagctgtggcctctaggattcttgagattgtgggcagggaacaggtcctggacaaaaaaacagggacctaccggccggccagatacggagactgtgtcattcttctgagaacgatatccgggtgggccgatgtattcggaagaattctgaatggaaaagggattcctgtgaatgtcacctccaggaccggctatttttcagcactggaagttgtcactgtgttaaactacctgcatatctgtgacaatcccaggcaggacatcccgctggcgggagtgctgacatctcctttgggcgggttctcctcagaggagatggcagttatgaaaggggcctgcagggaattgtctctgtatgacagtctggcagcctgggaagagggggctgtagggaagttagaagagggaaaagaattgacggagttggaagaaaagatacaccattttttcagcctctatgaacgccttcgggaaaaagtcccctatacgcctatccatcagctgattaaagacattctccgggagactggctatatggagtatgccagggctttgccggaaggagagattcggggggcaaatctgcagatgcttatggaaaaggccatggattttgagaagaccagttaccgggggctttttaactttatccgctacattgaatatctgcagaaatattccgtggatttcggggaggctaatgtaagctcggagaatgaagatacggtacgtattatgagcattcataaaagcaagggactggaatttcccattgtttttgtgggagggatgggaaagcggtttaaccagcaggatgccagaagcaagcttgtcctgcatccggatctggggattggcgctgactgcatggatcaccgtctgaggaccaagtgtcccacgctgaacaaaaagatcattcagcgccagacggtcctggagaatctgggtgaggagctgagggttctgtatgtagcgctgacccgggccaaagagaaattgattcttacaggtacgatagatcatctggagaaaaaaaaggcttcctggcagatgctggggagccgggaggaggagcttctgccctatggagtcctgtcaaaggcaggatgctactgggactggatcctccccgcactgttcagacacaggggaaaggaagaagaatccctgtttcagataaagtgtatctctccccttgcgcttgtggaggaggaggctgtggagcaggggatgcgcatggtacaaagagagcgttttctgcactgggatacgaagatcgtatatgacagagatgctgctcgtgatatagaggaaaggtttgccttcacgtatccctatgagcatctgcgggatgtcccggttaaggtgaccgtgtcagaagtgaaaagcgggcgtcttgggagagaagactcctttgagctgctggaggagtcccccattattccctatgtacctgattttatgaaagaagagcagggagaactctccggtgcggcaagggggacggcctatcaccggctcctggagtggctggattatgaaaaagcagaaagcccggaggcagtggaagcccagattatggctcttaccagtcaggggaaactgacggaggagatggcccgatgcatcagtgtaaaacagatatgggagttttgctgttcccctttgggaagaagaatgaaggaggcggcaagggccggggagctataccgggaacagcaatttatgatgagtgtacctgctgccagcctgaatgagcgctgggccgctgacgagacggtggtggttcaggggatcatagacggattctttcgggaagaggacggcattgtactggttgattacaagacagactgggttcctgaaagggaggaaggctttctcaaagagaaatatggggcgcagctggatgtgtatgcagaggcgttggaacggcttatcggagggaaaatgaaagaaaaaattatctattctttttatctgggaaaaggaatactggtaaaataataaaaaatatgttaaaatattataaattatatctgaagtgcagcgtcaaaggggacgacatctggtttggtgtccgtccccttttgcctgtactgctcagatatagaaaaaggagggaataggatgagtttttcagatgtgttgtcaaaggtaaatgattttgtatgggggcctgtaatgctggtccttttagtggggaccggactgtttcttaccatacgtctgaagtttttgccctggaggaatctgggattcgccctgcggtccgttttctcaaggcctgacagaagcaaggacgaaagcgagggtgatattacgccctttcagtccctgatgacggcccttgcggcaaccattggcacaggaaatattgtgggcgttgccactgctatggttctcggcggtcccggtgctattgtgtggatgtggatcagtgctttgtttggtttgtcaacgaaatatgcggagagtgtcctggccgtgaaatacagagaggtgaacgacgcgggggagatggcaggcgggcctatgtacgctatgaaaaatggatttaagaggaaatggattggcactcctctggcaaccctttttgcagtatttgcagttcttgcctcttttggaattggaaatatgacacaggccaactctattgcgggagctctgcatagtactttcggcgtcccaaagatgataacaggggccataatcacagtgctggccattatcattctgcttgggggcatcaagagcataggaagggtatgtgaaaagattgtaccttttatggcggttctatattttgtctccggaattgttgtaattatcattaacataaaaaatctgccctccggagcagcagaaatcttttccatggcattttctgtgaaagcagtggcaggaggcgtgggaggaagcgttgtggcaagtatgcttcaggctatgagatggggcgttgcaagaggggtattctcgaacgaagccggccttggatctgcgccaatcgcggctgccgctgccaaaacggatcatccctcccgtcagggatatatcaatatgacgggtacgttttttgacaccctggtggtctgttctgtaaccggtctggtaattgcctcttccggagtactgggacagatgaacgaggctaccggagaacttctcacgggtgcggatctcaccattgctgcctttcgcacagctcttggcagtgccggaggctggctggtttccattggcattatgctgtttgcgttctctacgattctgggatgggaatattatggggaaaagtcactggaatttctcgtccgctccacaaaggccaataaggtataccgcctgtttttctctctgattgcctttgtgggggcgacgactacacttcagattgtctgggatttttcggacacaatgaatggactcatggccatcccgaatctaatctgtctgctggtactcagcaatgttgtggcaaaagaatgctttgaatttcagaaaaatgaagtgaagaaggacagattctaaagcttgcgtttcagcatctccgcatttgaggcgtgactgagagcggtgtctttggagattatcccatctttgtaaagcctcagcagatttgcatctgtagagatcatatcctctgtggtggaggaatagataagtccctcaatctgtggcaccttgttatcacgaatcatattacggatggcaggtgtcactttcattatctcaaatacaggtaccagcctgccgtctgtggcaggcaccagctgctgagtcactactgcctgcaggcacatagaaagctgtacggcaatctgccgttgctgattggagggaaacacatcgataattcggtcgatggtattggcagcgcctatggtatgcagcgttgaaatgataagatggcctgtttccgcggcagtcatggccacgttgatggtctcataatctctcatttcccccagcagaatcacatcaggactctggcgcagggtggctctgagggctgtgacatagctttccgtatctgtattaatctctctttggcttacaatgctttttttatggctgtggagaaattccagagggtcctcaagggtcataatatgacgtgccaatgaattgttaatggcgtcaacaatgcaggccagagtcgttgacttgccgcttccggcagggcctgtgatgagcacaaggcctttggagagctggcccaggcgtataatgttggcagggattcccagatctgtggggttcggaagctggaaggtaataatccttacaacagcagccagggaacctctctgtttatatgtgctcacacggaaacgtgacattcctttgatagaaaaggaaaagtcgtcatccccgctttccataaacggtcggatctcccggttatctgctaatttatagatacttctgatgatttcttcggtatcaggggggagcagcctctgctcctcatgcaccaggaccccgttgattctgtaagagagggggaggccggcgatgataaagatatcagaagctcctttctgtgtggcgtttcctaataattctaatacatccatagagttatcctttctgattcaattattccccttccggatccagaagattcagagaatcatcaggtttccagtctttcacagaaacttccttccagctgataattctgcagaggggatcctgcagctgtctggggaagacaacttccagatcgcactctaaaataaaatcctcattgaccgggatttggtaagagatgacaggtgcccgggagggatccggaaattttgcccggactccttccatatccttaagtgcttcataggcatcctggtagtattcggcgggagtatcggcaggaatttctgtaagggcagtctgtatctctgccagaagctcctctcctctattgcaggcagtgtaatagtcagatgttctgtctgcaattttttcggcataagtaaggcttgccctggaacttgccagtgacagcatagcgaaggttaccagacatagtattataaagatgacgagtatggaagaggttcccatagtaacaacaggttgtttctttttctccatgacatgtcctttctgcagacggttttgttatcgggcgagagacagataacggttaacgtccagctcatagatacaatccttgccccggatatctgttacctctatgtgggaatacagcatctgcggctgaaaagacagatccgcccgaagcaggtatttggcatcttcctttttgcagaagttccactcactatcatagtagagccggaagccatgagtgtcaacaacggcgtcgggcagaaattcgctgactgcggaggaactgcagtcggtagtacggatcacctccgcagcactctgggcctggctgactgcctggttcagatctgcggcctctctggtgagaagatgggacttcacaaacaactgaacacagactgcgctggccagtgagaagaataaaattgcgatcatgagttccataaggaacaaactggaacgttttgcaggattatgagttttcatttgattactcctctgggatattcaggaactatgggttcctatgagaagggaacttttgctgccgcccgtatcttccacagtaaagcggtacagattctgtcccaattcttctacagtaaaagcattcacggtaagtatttcctggccgctgccgtcgggtacaacagccccctcttttgtgtataactccttgagctgtcttccttcgtagagataaatataagtgatatacgcagtatcctcaatctcctgtcggattaccagggcctggtggccctgaaaactgcccacgcttacattcccgcttgtatcattctgtctgattttttccgacagatacgtaagagcagtgctccgggtatgatacgtattcgattctgatactgcggactgatagacatccgcccccataataactaccatcagggcggaggctgcaaatacacagaaaagcgccagtgtaaataccaaatctaccacatggtttcttgatgttcttatgttcatactgtgcctcctcattcctgtctggaaataactgtgatatcaggcagaatattggatccggtgacctgatagtccacatagaaccggctgctgtcataggtaatcccatagtgttctttcaggtattccaggctttccgggtacgtgccttctgctgcatagcaccgcactactgcctgagacagagctgttttcaggctcttttcctgctctttcagggaaatccttgagatagaagtaactcctgtatagaataagagcagaattcccgcaaaaataagaacggaaagccacaggtttctggtattaggttgctttttatgctgaaatcgggccatatgccttacctcctaattgctgcattgcggttcctacagggctatagactggacataatacccataagcggcagaattacagacaacagaatcatacctacaataatagaaagaacagctaccagagtaggctccagtaccgaaatcatccggtttatatgggaatctacttcctcctcgtacagggaggctattttatccataacagtttccagggcacctgttttaaaccccacggagatcatccgggaatacagtccggtaaagagatgtgaatctgccagggcctgggagacatcaacgccggtatccattaattccatacagttttttatcttgtccgtcactttcgggttatctgcaagggcagatgccagttccatactctggtgggtgtctagcccgctgctgagtgtaagagccatacctcctgcaaaccgcccggaggccatcttttcccagagatctctggtgaggggaaatgcgctgagaaaggcggtcagcctttttttgccggatttaccctttgcaaaataaagatatataaggaagagggcaacaagaattccaataaatacataggagtaccttccaagaacctgtcccaggttcataagacctctggaaaatcctgtcatttcctgtccgagctgaagaaaaacctggttgaagataggcagtaccttaacaattaatactacgataataatcaacatcataccgatcataataaagggataggtaacagcactttttatagactgggccacagattcctccctttcataatatcggctcagggagtccatgacctcgtccagacgcccggactgttcccccagttctgccatgtgaagcatatgagagggaaatgctcccgtctctgccagggcctcccgaaagtttcctgtggactgcagggtattgcagatgatccggagaatctccttctcctgactgctgccggcatcctccagcataatggtaatcccctcaacagaagaaattccggcttttaaaatcatagccatctgactgcagaaggaagacagctctgtatttgtcaatggcttgatgcgggtatcctgtgccatataatctcctttccaaaatcttcgattaacagttaataagaatattggagcgtgtaattacttccgtccccaatatactttttcaagtcttttgcgccgttgctggctgcaagcgtgggatccatgagttcccaggacttaccgtcaaaatgaataatattatccacccacccgatttcgtccagatacgtactgatccaggcatgcttcagctcctgggtgtaaccgatctccagtttcgtcggaatcccctgggaacggaacatagtagtcataagtgaagcatagtcaaagcagatcccttttttggtctccagtgtttcatccacatcaggaagatatccgctttttacgttatccgctttttctttatcatacttgacatctccgattacaaaatcatagatcttttctaccacttccaaatcagaataacaattctccgccagggaggcagcttttgccaccgccagggaatcagcagtgaagcgcacatactgattgggatacaaaaacggggaaaattcatcgcttaacgtaacctccagaggctgggagaatgcagtggcatactggtcatctactacatgctccataatgtccacctggtatgtgccgtctccaccgggcaggggaaagacatcataatctccgtttagtgacagtgtatacttatataccgtctgatccggcagggtgagaagaacctttactaattcacaggtaccggtatacttcaccatcacatatccgtcagaggtatgggaggcatcgatgacaacagaatcatctccgtaggtcacagttccatcagccacaggggttagtatctgaggagtgttatctctgggtggaccttctggctgagactctgtttgcttttctttatgactgcagccaacaaaaaggcagagggcaagtaaaagaatggttattctgtatttgccgcggtacttgcatctgtccatgaatcagcctcctacctgtttgttataaatatcctatttgaactattttaacacagataaaaaataaaaaaaatactttgtaaatactattgacaaaaccatattatataacgtatagtattaaatataaaataatattacaaaaaaaataataatatattttttataatgattggaaaggagtggttttatggtatttaatacaggtgccgccttgctggacgcaattgtgctggccgttgtatccagagagacagacggtacatacggatataaaatcacccaggatgtacgccaggttctggaagtatcagagtcaacgctctatcctgtattgcgcagacttcaaaaagatgcatgtctggaggtctatgatatggaatacggaggaagaaaccgaagatattatcaggtaacagaaaaaggaatcgcgcagctggatttatacaggaaggaatggaaaaactattccggcaaaattacgcagatgttcgagggagggagagtataatgaacagaattgaatttatgaagcagcttgagcggctgctctgggatattccggaacaagagtgccgggatgccatagatttctacaacgcttattttgatgatgccggccccgagaatgaggcgcaggtaatcagtgaactggggagtccggggaaggtagccgcgattatcaaagcggatttgaaggggagcgcccagacagaaacttacggagaatatacagagacaggataccaggatcaccgtttttccgggggtacccaggtacctgacaggacgaatgttatccgtgagagagaggaaagcggccgaaggagaagccggggatatcagggcagacagacaaggagcggaggaaatctggctctggtgatcgtgattttggtatttacaagtcccgtatggttgggtctggccggaggaatccttggaattgtgtttggcctggtgtttggaatccttggagtggttctggggattggagctggctccctgggacttctggccggaggaggagcggtaattgtttccgggatcttgaagatagcgtccaatcctgcagtagggcttgcctcctcaggagccgggttccttatggtggcaataggcataatgcttctggtggcttttctctgggtagtggcaaagcttcttcctatgtcccttcgggctgtggttggattgtgccagaggatttttcaccgtggcagaggaggtgacaagagatgaaaaagtttactaagataagctttatagccagcggagttcttgctgtggtggggattgctttcctgatatctggttttgtcatgggggtaagctggcaggaagtagaggataccttcgaacttcacactgctgccagatggattgaagatcacggagacataatagagggcagtgaggcatctcacagctttccggcggctgagattaaaaaactggagattgagtttaataaaggagacctgtatctgtcagagaccgacggtgatgagattcgcgtaagtacctttaatggaaaagacaaggtaaaccaggaaaacgatactttaaagattgagagcagaggccgggtcaacaacgataatactattgaaatagagatccccagaggagtgagctttgatgaagtagaacttaagatagatgcaggcagcggtcaggtagactatctgaagacgaatgaactggaagctgaggtcaatgccggcgatctcaccttttatgaagatattgcagcggcaaaagtcaatttagatgtgaatgccggaagcttagacacagagctgctggatgccaaagaagtagagataaaatgtgatgcgggttctgtgagtaccatactctccggaagacagaatgactatcagattgaaatgaaaggagacctggcatctgtaagtctggatggttttgaatactccggactgtcaaccaaaaagcagtggggagatcccaatgcgtccagaaaactcgaggccaaatgcaatgccgggagtctggacatagaatttgaacttgattaaaaagcgatatatagaaaggggcaatttagtatgagtgaaaaaagattataccgttcatcggctaattatatgctttgcggggtatgcggaggtattgcagaatattttaacattgatcccacactggtacgtctggcatgggtgatactcagctgctttggaggaagcgggattatagcatatattgtagcggctattataattcccaagtaagagcgaagatttacgaaccgtctgaataaagtaccataaaaaaggtcatactccagtaagaatataaaggagtgtgactttttttatgggaaaatcgaagaaaaaggaagaaattaaattacatgagcttacacccgaggaacagttaaaatacgagattgctgaggaacttgggcttctggataaagtaatggagacagggtggaaaagcctgtccgccaaagagacaggaagaatcggcggattgattacgaaaagaaaaagacagctgaatcagggaaaagaatcttaggccggatggattcggagtgttaaatttatattgacactccgaatccatttgtcttaagatataattcagttagaagaatttaaaacacgaaggagaatctgcgttatgaatgagaccagcaaacaacagtcagttctggaaagattattccatttaagagagaatggcacggatgtgaagacagaagtgatcgcgggactgacaacttttatgactatggcttatattctggccgtaaacccctctatcctgaaagaggcaggcatggatcagggggctgtatttactgccacagccttggcggccctggcggccactttgcttatggcagtgctttcgaattatccctttgctctggcaccgggaatggggctgaatgcctactttgcttttactgtagtgatcggtatggggtacagctggcaggaagcactggcggcggtatttattgagggagttatctttttgctcttgtctctgacaaacgtcagagaggcaatctttaattccattccaatgtcgctgaaatatgcggtttcagcgggaattggcctttttattgcttttattggcctgcagaacgcaaagattgtgggagcggacccttctaccttggtatctttcttttcttttacgggttccataaaggaacataccttctctacggcagggattaccgtactcttggcactcctgggaactatacttatggcagtgctcctggtaagaaaagtaaagggcggtattttgtgggggattctgggcacctgggcagccggaatggtgtgtcaggctgcggggatttaccggccgaatccggagaccggattctacagtctttttccggatttcagcggtggcattggggttccgggaatgggggagacctttatgcagatggatttttccagggcgctttccctggattttgcggtcattgtgtttgcctttttgtttgttgatatcttcgatactctgggaggattgatggggataggagcgcaggcagatatgctggatgaggaaggaagactacccaggatcaaaggcgcattgatttcagatgcattgggaaccagcataggtgcagtcttcggaacctctacaacaactacatacgcggagagcgcaacagggatcgcagaaggagggcgcaccgggctgaccagtgtagtggtcgccgtattatttggtctttctctctttttatccccggtttttttggcgattccttcctttgccacggctccggctctgattgcggtgggatttatcatggtaacctctattgccaagataccttttaaggattattctgagtcgattccagcctttgtctgcgttatggcaatgccgtttttttacagtatttcagaaggaatctctctgggaatcattttttacgtgctggtgaatgtgcttagcggcaagaggaaagaaaagaagattagtctgcttatgtatattctggcggcaatctttgtactgaagtatatacttatctgaccgggaagcttattcgcagccggacaactgcccgctttcggcctgccttcaggcgggccgaaagagtttttccgggatggtattgcattatgaaaaaaattgtgctagaataattcttgtataattccatatgcagcatccagtgcacctgtgttgaccgcacaacattggtgaaaagggaattaggtgagagtcctaagcgatccggtcactgtatttggggagcgatactttagaagtccattgtacgcaagtatgagaaggaaaagtaaagctgtgatccataagtcaggaaacctgctagatgccaaaggtgagacttccgtgcaaagttgaacatcccttttataatatccgcaagtattataattgatgtatctgcttacccgctgggagagcagatttttttatggaatgccaaaggtaacggagcctgtgtgaattatgcattgattaaatggcaaggtgagttgccctgattcaagctctgatttactgctatgcgatccctgttgttccgcaaccaacaggtccgcagatcctccgcgaaagatcagaattgttcgtgaccgaatcagggtggacccgccccatttgcggatgagaagagaagaaaaagagattccctacttgacaaacagcaaaaagcctactatgataggacgtaagttcaataggaaaaggttatgagaaagaggagtatatctaaagaccctgtcagagaggaaggttcaccggctgaaaaaccatcccgggaaggttagatagaaggtagcttttgaaccggagggctgaagattttgcgagtggtttcgtagagggattcattgtagaattggtaagccatcacgcctggtctgcgttaaaagacttaagagatataggagagaatgcagttccttcctataataaaggtggtaccgcgcatctgagataagtatgacgccctttacaacaattgttgtaagggctttttttattacataggaaactttgtttcctatgtaataaaaaaccctcggggggatcacactgcggcggaaaggaagatgctgtctgcgacagcccgcctggtacaggaattgtatttcccaatacgctcagaagagtaaaaataagaaaaagagaaaataataccaaggaggctatccatgagcaaagagttagcaaagacctacgatcccaagggactggaggatagaatttatcaaaaatggctggataacaaatatttccatgcagaagtaaacagagagaaaaagccgtttaccattgtaatgcccccgccaaatgtaacagggcagcttcatatgggccatgcactggacaatacgatgcaggatattttaattcgttttaagagaatgcagggctatgaggcactatggcagcctggcacggaccacgcggccatagccaccgaggtaaaggtcattgagaagctgaaagaagagggaattgataaagacgatataggaagagacgcgtttctgaaacatgcctgggcatggaaggatgagtacggcggaagaattatcaatcagctgaaaaagcttggggcatccgctgactgggacagagagcggtttaccatggatgagggctgctccaaggcagtggaagaagtgtttataaaactctataacaaaggatatatttacaaaggctccagaatcataaactggtgccccgtatgccagacatcgatctctgatgcagaggtagaacattcggagcagacgggccacttttggcatatcagatatcccatcgcagggagcagtgagtttgttgagattgcaactaccagaccagaaacaatgctgggggacacagcggttgctgtgaatcctgaggacgagagatacacagaccttatcggcaaaaccctgaagcttcctttgacagacagagagataccggtcatcggggatccatacgtagacaaggagtttggaactgggtgtgtgaagatcaccccggcacacgaccccaatgactttgaagtgggaaagcgtcataatctggaagagatcaacatactaaatgatgatgcaactatgaatgacaggtgcggcaaatatgcaggcatggaccgttacgaggccaggaaggccatggtggcagaccttgaagcgcaggggcttctggtgaaggtagaagaacatgtgcataatgttgggacgcatgacagatgtaaaactaccattgagcctatggtaaaaccccagtggttcgtccgcatgaaagagatggcaaaacctgctgtggaggcggtgaaaaaaaaggagttgaagctggttcctgagcggatggagaaatcttacatgaactggatggacaatatccgtgactggtgcatctcccggcagctctggtgggggcacagaattccggcctattactgtgacagctgcggagaagtggcagtatcaaaggaaaaaccggcgctctgtccaaaatgcgggtgtgcacatctgacacaggacgaggatactctggatacctggttcagctcagcgctgtggccgttctccactctgggctggcctgagaagacggaagatctagaatatttttaccctaccaatgttttggtaaccggctatgatatcatattcttctgggttatccgtatggtattctccggaattgaacagactggccagcttccctttgacaccgtaattttccatggactggtgagagattccgagggaaggaagatgagcaagtctctgggaaatggaatcgaccctcttgaggtgatagacaagtacggagcagatgcgctgaggctgacactgatcaccggcaatgcaccaggcaacgatatgcgtttctattgggaaagagtggaggccagccgtaactttgccaataaagtatggaatgcatccagatttattatgatgaatctggaaaaagctgaatcggcggaagaaccggatcctgcagcgctcactgatgcggacaaatggattctctccaaggtgaatacccttgcaaaagacgtaacagagaacatggacaaatatgagatgggcattgctgtacagaaggtctatgactttatctgggaagagttctgcgactggtttattgagatggtaaaaccaaggctttacagtgacgcagatgagacgaaaggggcggctctttggaccctgcggacagtgcttaccaatgcgctgaagctgctgcatccctttatgccctttgtcacagaagaaatctactgcacgctctgtccggaggaggaatccattatgatctccagctggcctgcattcagagaagactggagatttgttgaggaagagaagaaggtagaattgataaaaggggctgtaagggagattcggaatgtgagaacgcagatgaatgttcctatcagcaaaaaaacaaaagtgtttgtggtttcagagaaggaggaggtgctggacacctttgaaaagggtagggtattctttgctacccttgcacatgccagcgatgttctggtacagaaggataaaacaggaataggagaggatgcagtctcagcagtaatccctgatgcggtaatttatcttcccctggcagaactggtagatatagaaaaagaaattgagcgtctgaaaaaagaacaggagaggctgacgaaggaacttgcccgtgtaaacggtatgctgaaaaacgagaaatttatgagcaaggctccccagcagaaggtagaagaagagcgggcaaagctggaaaaatatacccagatgatggagcaggtaacgctgcagctgcgtcagatggagaaataggaaagggcaggcatggcctgccctctaagtaagagaggttaattatggaaaaatggataaaaagactgaatctggtgtctgtccctctgcagatgctggcagtgtgtctgggatactttataatagaagcaatctcccgccattctgtggccgaggcttatacattcatgacagaacgtcctttagtctttttgtataatgcatttttaatatttaccactacgctgattgtctatctggtgaggagacgtgtgttcctgcgcactcttcttgctattttctggatgggactgggaattataaacggagtgctgctgtctaaccgggttacaccgtttacaggaccggatcttcatctgattacagatgcttttaacattatgaataagtacttgtcccccggtctcatggtagtggcgctcatcggaatacttcttgcgctggcgggactggccctgctgttttttaagggaccgagatatcagggaacactgaaatacaaatggaatatccccctggttcttgcaggggtgctggcttttgcggggacaaccaagcttgccctggaaaagagggtactgtctaattattttgggaatatagcctttgcctatgaagactacggttatccctactgtctggctacaacactgtttaacacagggattagctgtcctagagagtactcggaagagaccattgccaagattgaggaaagcgagaataagctgcccgaaaccacagagaacaggccaaatattatatttctccagctggaatctttctttgatcccacattggtaaattatcttcagttttcagaggatcccattcctaatttccgccgcctgatgtcagaatattcctctggctactatcgggtcccgtcggtaggggcagggacggccaacacagagtttgagtccataaccgggatgaatctgcgctattttggtccgggggagtatccgtataagagcattctcaaggagaaaacctgtgagagcgctccctatgtactgaaggggctggggtataccacccatgctatacacaacaacgaggctaatttttatggaaggcgatcagtgttcgctaatctgggatttgacaccttcacatctgaagaatatatggatgagcaggatgaggtaaatccaaatgactggatgaaagataaagtcctcaccaggcatatactggactgcctgaactctacagaaggcccggattatgtctatacgatctccgtccagggccatggagattatcccgaggaaccaatgattgacaatcctgaaattacagtcaccggcggtgagtcagaggctgtgaataacaaatgggagtactatgccaaccaaattcatgaaatggacgaatttgtacaggagctaattgatgcgctctctcagctggatgaagatgttgtgttagttatgtacggagatcatctgcccactatgggacttaccgttaaggatgtcaagaaccgctatctgttccagacagagtatgttatgtgggacaatatgggcctgaaaaagaaggatgagaatctctctgcctatcagatggccgcagaggttatgaatcgtgtggggattcacgaaggaaatatcttccggtatcatcaggcgcggagaaaaacaaaaaattatcaggtagatctggaaatgatccaatatgatattttgtatggaaaacagtatgtttacgatgggcagagtccctttgaacgtaccaagattcatctgggtattcatgatgctaccatctcttcgatagagccggtgtctgccaacagctattatgtgaccggaacaaactttacccagtctgcatttgtggaaatcaatggggaactggtagagactacctttatagatcccaggacgctgctcctgaaagatgtggagttaaaggatggggatgaggtggacgtggccataagaagcaacagccccacaaaaaaggtgctcacaagaacagagccgattatctacaggattcctgtggcggatgtgagcccgggtgatttgacagggcagcctccggagactttgccggaggagggactgacggatggcatgacagacacggggcaggaagaaccccagaatctggttcctcctgcagagtaaaagaaactttaagagatacgacataatttgcttgcatattgccaccgctatattataatggtaaagagtgaccaaaatgatacagcggtggctttcaatttagtttaacagagaaaagagaggaaacagctttgtttacgtatgaagaggcagtagaatacattgaggagattcctaaatttacaaagaaaaataagctggaacacaccaaagaatgtttaagacgtttggggaatccaggttctgataaaaaaatcatccacgttgcaggcactaacgggaaagggagcgtctgtgcctttctggcttctatgctccggcagggaggctgtgtctgcggactgtttacatccccccatctggtggaaatcaatgaacggttccagattgacgaggtgcctgtggacaaccagctgtttctggaggcatttattaaggtaaaagaactttcggacgaacttctgtccgagggaagttaccatcccacatattttgaattcctctttttgatgggaatgtggatcttttgtaagacagatgtggaatacattattctggagacagggctgggcgggaggttggatgcgacgaattccattgcccggcctctggcctgtgtcatcacatccgtcagtctggatcacacagaatatctgggtgacacagtaactgccatcgcaggtgaaaaggccggtattattaagaaccaggtacctgttatctatgacggcaatctccctgcatcctctgaagtaatcaaaaagagagcggaatccctggagagtttatcctgcccggtgacagaagatcagatttccattcatagaattgccgccgagggcattgatttttcgtggaagagcgggtattatcaagatgtggctgtcaggattccctttattgccaggtatcaggtgatgaacgccgctttggctatgaaagtgatggaggtcctgaaagatatccataaaataccggtggaagctctggtggaggggatcgcagtaaccagatggcagggcagaatggaaacagttctgccgggagttattgtagacggggcccacaatgaggatggagtggcacgcttcgttgaaacggtgtcacattttgaagaggaatatccggtgaccctgttattttctgcagtatcggataaagattatgaggacatgattcgggaaatttgcagcggcctttccctctccggggttgtaaccaccgaggtggggggatatcgggccgtctcagccggcagactggcagaggtattccgggagaatgcctgcgaaacagtatatgcttgtcctaatatagaacatgcatttgagaaggcctgtgacctgaaaaaagaagggatgcttttctgcgcaggttctttgtatctggtaggggagataaaggattatatcaggaggagagtacatgattaattatgaagaggagctaaagaagtttcagccctgtctggatgtagatgacgcagagggagtgatttacagccgggatttgacagatgtcattgatatcttaaaggaaattatgacagaaaccagcggtagtgacagagaataaggagatgctgaaatgaattgtatgttttgtggcgctcctttgggtgcttctgattactgcggcagctgtaaccgcaatgtgggagctcagaagaaggcattgctcttgtcaaatctctattacaatcagggactggaaaaagcacagatccgggatttgtccggggcaattgactgtctaaagagaagtctgaagctgaataagctgaatatacaggcaagaaacctgctggggctagcctactttgaaacaggtgaggtggtggcagctctcagtgagtgggtgatcagtaagaacatccagccccagggaaatcttgctgctgagtttatccagaagcttcaggggaatcccaaccgtctggataccattaatcagacgattaaaaaatacaatcagtctctgctttactgcaggcagggaaatgttgatatggctgttatgcagctgaaaaaggtcctggcccagaatcctaagctgatcaaagggtatcaccttctggcacttctctatatcagagaacaggcctatgagaaagccaggaaactgctgagaagtgcggccaaaattgataagaccaataccaccaccctccgctttctgcgggaggtggacgagcagaccggaaaggtgaccagtctggaacccaggttccgggggttgagccgagagaaggaagaaaagaaagcagagcggtctgtgtattattccgggaatgatcttgtgattcagccgcctgcgtttagggagagctctacggtggccacgcttctgaaccttggattcggtctggtggttggggctgcccttttatggtttttaatcgtaccgggcaagatccagaaagtaaatcaggaggcgaatcaaaaggtagtggaatacagcgatcaggtggctagccaggcagctgaacttgagcgtctgcagagcagcatagaaagctcccagagcacagtagattcggcaaacgatcaggttgcacaggccgaggaaaaggctgccagttatgataatctgatgaaagcttctgctgccctgcgtgaggagaactataccacggcggccaatgcacttcagagtgtaaatcctgaccttctgtccatagaggcgaaatctgtgtatgatactgtgtttggagaagtgaagacaactttgtaccgtcagtacaaaaaggacggggagagtgcctatgaatctcaggattatgccacagctatagatcagctcaccaaagctcaggagattgacgccagtgattacaatgtcctgtattatctggctatggcgtatagggaaaccggagatacgcagaatgccattgcccagttccagaaaataatcgatacctttccgaatacaaagcgggccacagacgctaaggattatatggaggccctcggaggaactccgggaaacggggacagcggtgaaggagacacccagggagaggagccccaggaggaggattccggagaccagccggaagatacaggggacaacagaggtacagaagaaggagaataaagcttacaggaagaaacaaaaagagaaacctcggattaggggatgcaccaaactgtgtgcatctctttttgttgtacagatacttaagaacccggaaaaacacatgagaacagtataaagcttgtagaaaaggggaaagatgggaatatggaggaatttttgcttaaaaaagggaactgtctgatggttgcggttcccggagagctggatcatcacaccgcggagccgatccgcagagcggtggataaaagactggaagagggagtaatccggaatgtagtgtttgacttccggaatactacatttatggacagctcagggatcggtatgctgatggggcgttaccggcttttgcgctatatgggaggtacagtgactgcgatccacgtaagtgacaggatcctgcgtattatgcagctgtcagggatccataaatttatagaaatcagccaggaaactgtatggacacaaaaaagaaagtgaggggagcagatatggaaaataccaatgaaatgataattgaatttgacagccgttcctgcaacgagagttttgcgagagtaacggtggcagctttttgtacccagctgaatccgacgctggaggagatgacagacataaagacagcagtctctgaagccattaccaatgctattgtccacgggtatgagggggagatacataagataaggatagaatgccgtatccgcgataatgagatggaggtaggtatcattgaccggggcagaggaatagaaaatgtaaagaaagcaatggagccgctgtttaccacgaaaccggagcaggacaggtccggaatgggatttgcttttatggaggcatttatggacgaggtaactgtggattctgcaccgggacaggggacgaaggtgtggatgaaaaaaagaataagcaataagaatacactgttcgaatagaaggaggaaatatggaccatatccttgccctgatcgggcgtgcgcaccaaggggataaggaagcaagagatacattagtagaggaaaatatcggattagtatggagtatagtaaagaggtttggcaaccgtggagtggagatggaggacctgtttcagatcggaagcatcggactgcttaaggctatcgacaaatttgacacgtctttcgatgtcaaattctccacctatgctgtccctatgattgccggggagattaagaggtttctcagagatgacggtatgattaaggtcagccgctccatgaaagagatctcgtataaagcttatgtaacccgggaagaactggagaggagtacaggaagagaaccaacccttctggagattgccaatgaacttcaggtaacccaggaggagcttgttatggcaatggaagccggctcccagatagaatcccttcagaaaacaatctaccagggagacggcagcgatatctctctggaagagaaactggaggaaaagaaggatcatcaggaagcacttctcaaccggttgctgctggaggagattttgggtaccctggaggcccaggacagaaaattaatttatatgcgtttttttcaggaaagaacccagtcagagattgcaaaagagatgggaatctctcaggtgcaggtatccagaatggaaaaaaggatacttcagtctctccggggaaagctttagctgccttacacatacagcctgctgtgcggtctgcatcctttgatgcaaatcccggcaggctgtatttgtatattttaatagaaagaaaggcatactacatggaagaaaagtacctgtaagggagtgaaataatgagtgacactttatatattcaaactgaaaaaaatgtagaggtacacagcccggatgtatatctgcaggatgtggcaaaactctcctgctgcaacagcagtgtgctcaacaggaataaggtcagaaaaatttttaccataccgcaggataagccgggcagatatgttatttctgccatggatctcattgacgagatacagaaaaaagaacagagcgtggatgtgaaccacatcggggagcctaattttgtaattacctatgagactcagaaacacaaacatgtggcctacagctggtttaaaaccgtattggtaagcctggtgacctttgtgggcgcggccttttccattatgacctttaatacggatgtggatacctcggggctgtttttccatatttataaacagttcaccggcaacatctccgatggatatacgatcctggagcttacctattctatcggaatcggccttggggttatcttcttcttcaaccatttcggaggcaaacgactgacgcaggatcccacgcctatggaagtggagatgcgcctctatgaagacgatattgatactacgatcattgagcaggcagagcgaaaggagaatcagtaaatgtggttagtatctcagattgcagttggagccatcggacttgcaggggggatggtagtggcaagcggtctggcagctcttatgattgggttggggattattcccaggtatgcggggattactcacacaggggacaggatactgctgtatgagacctgtaccatgctggggactattttcggcaacctcttttatctttaccgttgggagctgcctgtggggactatagggctctgtattgtaggactgctctttggtatctttctgggcagctgggtgattgcactgggagaagtggttaatatattcgcaatcatggccagaagagtgggactgaccaaaggcatcgggctggtaattgtgtccatggcagccggaaaaataataggctccatccttttctttttctatggatggtagagaactatataaatcagcgagaaaggacttaaaactatggttgatatagcgaaagaaaaaaaacaaaaagaatatgaaaagtatgtaaaaaaggtaacaccaacccacagtctccccctaaatatggcaaaggcatttctaatcggggggatcatctgtactctgggacagggcatactcaattttgcacagagccagggcctggatcaggagacagcgggagcctggtgctctctgattctggtgctcctgagtgttctgttaacagggcttaatgtatatggaaaaatagtaaaattcggaggagcaggggctttggtacccattacaggattcgctaattctgtggcagcccccgccattgaatatcagaaggaagggcaggtctttggcattggttgcaagatctttacaattgcaggccctgtaattctttatgggatatttaccagctggattctgggactggcctactggatattaaagacagcagggattgcatagagaggagaagcaaaatggatcagacaaaaggaaaacagagtatagagtttcaggagggagtgcacattctcagcggagcttctatagtaggaaagaaagagggggaaggtcctctgggttcttgctttgatttgattggggaggatccaatgtttggatgtaagacatgggaggatgctgagagtacccttcagaaggaaacagcacagctggccatagggaaagcacagctggaaaagtggcagattcgcaccatctttgccggggatcttctggcgcagtcgattgcgtcctcctttggaattatggatctggagatacctgtctacggcctgtacggtgcctgttctaccatgggggaagcgctctctttgggggctatggcagtatccggagggttcggagagtatgtactctccattacatccagccatttcggaagtgcagaaaaagaattccggtttccgctggaatatgggaatcagcgtcccctttccgctacctggacagtaaccggaagcggcgcttgtgtgctgggaaagaagggggggaaagccagaattactggtttgaccacgggaaaaattatggactacggactgaaggactctctgaatatgggagcttgtatggctccggcagcctgtgacactatttatcagaatcttatggacttcaacagaagccctgaagactatgatcgcattattaccggggatctcggtgaggtagggcagcgaatcctgtttgatctgatggcggagaaaggctttgatattaaaaagcagcatatggactgcggaattgaaatttttgacaatgcaactcaggatacccacgctgggggaagcggatgcggatgttctgcggccacctttgcctcctacattctgccaaaactggaaaagggagagtggaagcggattctctttgtgccaacgggtgcgctgctctcaaaggtgagtttcaatgaaggacagagtgttccggggattgctcaggcagttgtggtggagcattgttaacagatacaaagtactaaattgtgagaaggagaaatattatggattatatcaatgcattctgggtaggaggtttaatctgtgcgctggtgcagattctgctggataaaaccaaaatgcttcccggaagagtaatggtacttctggtgtgcaccggagccgttctgggggctgtgggaatctacgaaccatttttaaaatttgccggaggaggagccagcgtaccgctgcttggctttggaaatgtactctggaaaggagtggagaaagccgtcacagaaaaaggctttctgggaatttttatgggcggttttactgcaagtgcagtaggaatcagtgctgcccttgtctttggatatctggccagtctgatctttaagccgaaaatgaaggactaaaaattaccagaggaaaaaagcatgtacttttcccggttaaaatagtataatgtcgatatatatagacattatactattgcctggagaacaggtgagaggaaaataggaggaatgacacttatgttgcatgcgttttccagaacagaatctctgataggagaaaaagggctggacaccttactgcggtctaaagttgccgtcttcggaatcgggggcgttggttcctatgtggtggaagcacttgccagaagcggggtcggtaatcttacgctggttgacaacgatgaggtagcggttaccaatatcaatcgtcagctgattgctcttcgctcaacgataggaaaatccaagacacaggtagcaaaagacaggatcatggatattaatcaggatgctgtggttcacacctacgatacgttctacagtgccagaacagcagatctttttgattttagtacgtttgactatgtggtagacgccattgatacggtatcgtccaagatcctgctcattgagaaagcgaaagaagcgcaggttcctattatctcatctatgggaacggggaataaactggacccgtccaaattccagatcacagatatttccaagacgagcgtctgcccattggcaaaggttatgcgtctggagctgaaaaaaagaaaaataaagaaagttaaggtgcttttttccaccgagctgcctcagaaggacaggaggaagaggggagaaccacaggagacaaaaggaaacacgaatcaccccgtgccgggaagtatctcttttgtgcccagcgtggcgggccttttgattgcaggggaagtgattcgtgacttgctgaaggaaaaagagcagaataaataaagacagagggaagcagaggttagacagttgaaggaaaatatagtaaatgaattttgcagcatagtaggaagcgataacgtttggacggatgagcctatgtgtaatcataccaccttccgaataggaggaccggcggattactatctttgcccccactccattgaagagatacaaaggatattacatacctgccaggaggcggaggtgccctattttattcttgggaacggaagcaatctgctggtgagtgataaaggctaccggggagcaatcatccaaatctaccggaacctgagtgatattctggtggaaggcactctgctcacagtaaaggcgggagcactgctttcccaggtcgccagaaaagctatggaatatggtcttacgggatttgaattcgcaggagggatccccggcacattggggggagcggttgtgatgaacgcaggcgcctatggaggagagatgaaagatgtccttcaggaggtggtagtgatgaccaatgagggagaggtatgctgcctgaaagcggaggatttgaagcttggttaccggaccagtatcatcaaagaatccggatatattgttcttgaggcggccatcaggctgatgccgggggaaaaagaaaaaatcagggaaagaatgaacgagctgcgtgacagaagggtaagcaagcagcctttggaatatcccagtgcaggcagtaccttcaaacgtccccagggatattttgcagggaagcttatcatggatgccggactgagagggtttgcagtgggaaatgctcaggtttctgataaacactgcggttttgtgattaataatggaaatgccacagcagaagaggtgagggagctcatccgtcagatcgttgagagagtttatgagaattcgaatgtaaccctggaaccggaagtaaagtttttgggagaattctgacaggaggagtaaaagatgcgttttgtgatagtgactggaatgtccggggctggcaagagtactgctctcaagatgcttgaggatgcggattatttctgtgtagataatctgcccatcccattgattgaaaagtttgcccagctgatggttgccagcgaagccagtgagatacaaaaggttgctttgggtgtggatgtcagaagcggccaggcattgggggaattggaaaaggtcctggaggggcttactctggcagggttcaagtatgagattctctttttggatgcaaaggattccgtgctggttaaccgatacaaggagacccgccgtacccatcccctcgccgggaacgggcgggtggatcagggcattgccaaggaacgtgtaaggctggaatttttgaagaagcatgcggattatattatcgatacaagctatctcctcaccagagaactaaaaggcgagattgacaagatttttgtccagaacctggagtttcgaagccttgtgattactatactatcctttggattcaaatatgggataccgggtgactctgacttggtgtttgatgtacggtttctgccgaatccctattatatcgaggagcttcggccccttaccggaaatgatgaaccggtcagagaatacgttatgggatttgacgtgtcccatgagttttctgataaactagaggatatgatacggtttttaattcctaattacataatggaaggaaaaaaccagctggttatcagcattggctgtacaggcgggaagcaccgttccgtaactctggccaatgaactctacagaaggcttagtcaggagactgaatttgccctgcgggtagaacataaggatattacaaaggatgcgttccgcaaaaaaatataaggcaggtaatgaagatgtctttttccggacaagtaaaggaagaattatccaggcacatcagtgaagccagacactgccaaatcgctgagctggccgcaattatagggttttgcggaaggattacaccttctggccaggatggatttctgctgactatgcacacagaaaatgaatatgtagcaagaaagtactttacattattgaaaaaaacatttaatatagatactgatatctgcgtcagacagaatccatcgttacataagaacaacggttataccgttttggtgggtacgccggaggatactgtacgtgtacttcaggcggtgaagatactgagttcggatatgcagatagcacctcaccataatctggtgaaccagatggtagttcaaaaaagctgttgcagacgggcatttatcagaggtgcgtttttggcatcagggtctctaagcgatcctcagaagttttatcattttgagatagtctgcaacaccagagagaaagcggtgcagatgcaggaactgatatgcagcttcggcgtggatgctaaaattgtaggcagaaaaaagtattttgttgtctacattaaggaaggcgcccagatcgtagagattctggggattatggaagccaatgtttctctcatggatctggaaaatgtgagaatactaaaagagatgagaaacagcgtcaaccgtaaagtaaattgtgaaactgctaacataaacaaaacagtgagtgcggcagttaagcaaatagaggatattaaatatatccaaaaaaccataggatttcatgagctcccggagaacctggaagagatagctaacctaaggttagaatatccggaagccaccttaaaggaactggggatgttgttatcacctcccgttgggaaatccggagtgaaccatagacttagaaagttgagcagcatggcagaagagttgaaaggacacaaggaggagtaagtatgatcaggaaaccaattactatcaaaatctcaaacggcttagaggcgcgccctattgcattattagtacaggttgcgagtcagtatgagagcagcatctacgtagagagtgaagcaaaaaaggtcaatgccaagagcattatgggaatgatgagtttaggattggattcaggagagtctgttacagtttctgttgaaggaacagacgaagcagaagctatggagagtattgagaaatacttgagcagtaaataagatatcggagaacaaaacgactgtcgaataagagcattctcgcaggaatcaagagtattaaactagattctcctgcgggaatgtttttttgttattttcttgtcacctcgtttttctgtattctgacatagacatatgttccatttctttaaacagtttctggagtgactttggagaggaaaaccccacaatatgggcgatttcctcaatcgagtaatctgtattgcacaaataatctttggcatattccatgcgcagtatgcttaaagtcttgctgaaggtggttccgaataaggattggaatactctgtttacatgtctgggggcaatattcaaatgtgctgctacactgtctatggtgatctcgtgctggtagttcatatggatatacttggaagcctccagtcctaagttgagtatgccgtcaggtttttgctgtgacgatactttatcattaatatgccgaagtgcctgtataaaaaactgataaaataaaacatttgtaacagaagcccagccaatccttttttccttcatttcattccatatttgattcaaaagcctggttccatggaaggtttccctggacagcagatacttctcatgaacgatcaaatccagcacttgctggatttctttatattccagagctccaaacagcgatttcgaggatactttggagacaaaatcgaagataattacaaaatattcctttttctcatttggttcatgaaacacatggtgattgatattgggagaaagataaagaacctctccggcagaaagggtcagttcctgctcctgtaccagaacgtgcagacggccgcttgttacataataaatttcatagtatgggtgataatggcggaattctactgtagaactgttcagcttttctgcgtattgaatcataaaatcgaaatcaggcatggtgacagaggttatgtatttttggtatagattatcagggttatagatattatccaatcggaatcacctcactggcattttgtttacaaaattatgagtgaattttagcacaaataaacaataaagtaaatataaatgacagaaaagagacatattagagaaatatatgtctcttaggtcaattgaatttagaaataatagctaatataattcatatatcagagaaaaatatgtgcacaatgttctgcggaacgggatgcagctattatggaggtatggaaatggctaaaatgagacaactatggtttgtggcggagaatacagtagaggtgctggaggtagatatcccgcctgtgcttccgcgccaggtgaagattaagattgcctatgcggctctctgtgctacagatgtacatcaggttacaatgggggtgttggatgcgaaaccacccatggcgctggggcatgaagcggcaggaattattgaggaagttagtccggaagcggctgccgcgggttatcaagtgggggataaggtggcattatatccagtaaccagctgcggtatatgcgaacagtgcaaaaaaggtatgcctcagtattgcattcattcccagacaaccggtgcattcgcagagtatgtggttaccgatattagtgcagtctttaagattcctaaggatgccgatctcatgcattatagcttggtggaaccggcaaactgcacggtgcgggcgctggaccttgcacctatccgtcacggggcaactgtagccatagcaggtgtgggtgggattggatctattatgctgaatatgattctcctctcaggagcatctaaagtgaccgccattgatccggtggaggacaagaggagtatggcgctggacatgggagccttgcatgtgatagatccctttcatgaagatgtggaggcgagagctatggagataaccgggggagaggggtttgacatggtttttgagttctcgggctctccgaaggcagccgaaactcctttgaaaatactggctaaatgtggaacggcagtgtattttgcggtatttcctccaacctttgaaatgcctctgaacttatatgacttatacaggaaggaaggccggatacagactgtatttactacaacgtctattatgaacagaacgataaatctgattccgagaatgcagctggataaaataattggaaaagtaatgcctcttagggagggagcggaggcttttgctctatttcataaatctatttatcctaaaattctgctggactgctcaaattaggaggatgactgcatgggtacaaaaacagagaataaagaaaaactatctgcgtttcgtgtaattggctatgcctcaggagactttgcaaacaatttcagctgggcgcttgtatcaggctatctgttgtatttctggaccgatgttgcgcttattcctgcggctctctgcggcaccttcatgcttctatcgaaagggatagatgctgtcagcgatcccattgtaggggcattggcagaccggacaaagtctaagtggggaagataccgcccctggattatatttgcagcggttcctatgctgattttcaatatcatgagttttacagtgtttccttctgacaatgtaactgtgcgggcggtgtatgctttggcagtttatgtggttttagtaatcgcttatacctgtgtcaatattccatattccgctatgccagccgccataaccagggatgacaatgaacgctccaagctgtcgagctggcgtatgacaggagcttttatcgcaaccttgatactgtctcagggggtactgagggttgttaattttgcaggcaagggggatgaggcgaaaggctatttttatgcggccataatcttttctgccatagcttttcctatctatttattctgttttaagacgacaagagagacggttgacattcccatgacagaagaaaagatgggcttaaaagaatatgtgagggttttaaaaggtaaccgtccggtatacatattgattatatcctttgtgtgctggggattctacgaggcagcgattggggctgtgagaatgtactactttaagtattatgtaggagatgccaatttgtttatgctgaactcaagcctgatgtttctgggaagagtatttggaacatattctctggcttttctggtaaaaaaagtttccaataagagaacgcttcctctaattgggtttatggccagcggaatactaatggtaattatgaactttctgccggtacattctcagacaggtctgaacttttatcattttatgacattcctaacaggaattggcggggggcttggccttgcttccctttttggaatggtgccggattgttctgaatacacacaatataaatatcatacccatgccattgggtttatctcagcgtttatcaacttcgcttttaagctggggatggcattttgtactgcttttataggatggatcttaagtgctctgggatatatggcaaatgcagagcagaatacttctgtgctgactgccattaatctgacaatgaatggaatctgcggtatcctgctcataggggcagctgtagctctgattttctatgggattgataaaaagagctatgcggcaatgagaagggagatagaaaagaaaatagaagagagtcatgaactatagaaactatggggaaggggttgtcctgacaatgttatttcgggacagccccttgtgtgcttttagattattcggcatccttctggcggaaccagtaagtataaaaatcttcgtatcctagagcagaatacaggcgtttggccggttcattgccctttactacctggaggtatgaggaggaggctccctgacggatgccttcctgaatgattgctgtgcagattgcctgcccccagtgccttttccggtacagctcttctacgtgaatggcatacaggccaatgtattcccggtccagtatcccaagtccggtggcagctatctggccgtcaactttgatagaggcagcaatggtatctttagggatggcccggtacatagagggaacaatggagcggtgaatggggttggtggttcctttcaggcggaaaagcccctggatccattcggcggggatatagtgatccaaatgcacgtcacaggacggaggggtgcaggaaaatttctccagatccatagtcattacttctgttatatgactgatgttgtatccactctctgccagcatctggtcaaacgcgctgtctacaagagggctgatcttaaagatggtcggtgtgccccagtcttcatagatactttcacagtagtttatcttttccctcagggggatagtggatgggcccagctgctccacactgttggtgcggtgggtataaaaataagaaaagcgcagaatccagctgtcgtatatctgcatttgatgagaaggccaggcattcagagaaaggtcctcgatcatttttatcttccgtttcataatagttctccctcatttgattgtaagagcaattctatccacattatagaataggcgtcggaaactggcaagtataatcttaggcactccggttacttgcgggaagggggaaaaaaggatataatcagataatatgaaagaaaggcaggttattacatatggatattaagaatgcgtggattaagtataaggggaacgagcgggagaaagtcatgaactttgcggagggctacaaaaactttctgtctgcctgcaagacagagagagaatgcgtagacagaatcatagaggaggccagggagcagggatatctggatctggaggaagtgatccgcaggggggcatctctcaaatccggggacaaggtatatgccaataacatggggaaagccctggcgctgtttcagattgggaaaaaacctttggaggacggcatgcggattctgggagctcatattgattctcccagactggatctgaaacagaaccctctctatgaagagggagagcaggcgctttgggagacacattattacggcggagtaaaaaagtatcaatgggttacccttcccatggctgtccatggggttgtggtgaaaaaggatggtaccaggatagcgctgaatatcggggaaggtgatgaggatccggtggttgggatctcagatctgcttattcatctctccggaaagcagcttgcgaaaaagggaaatgaggtaatcgaaggggaagatttgaatgttcttgtgggcagctgcccggtttctgaggaagaagacgaggaaaaagagccggtgaaggcccgggtgctgcaaattttaaaggaaacctatgagatagaagaagaggatttcctgtcagcagaaattgagattgtgccggcagggcgggccagggactgcggcctggacaggagcatgattatggcttacggccatgacgacagagtatgcgcctatccttcctatcaggccatgttccaggtgaaggatccggaatatacttctgtgtgccttctggtagacaaggaagagattgggagcgtaggggcaacaggaatgcagtccagattttttgaaaatatggtggcggaagtcatgaatgctgcaggggagtacagtgaattgaaggttcgccgggctttgagccgctccaggatgctttcatctgatgtgagcgctgcatttgatccgaattacccgcaggtaatggaaaagaaaaatgctgcttttttgggaaaaggagtagtttttaacaaatataccggttcccgggggaaatcaggatccaacgatgccaatgcagaatacctcgggagtctcaggaaagttatggatgacaatcaggtaacctttcagaccgcagaattggggaaagtagaccagggcgggggaggaacgatagcctatatcctggctaattataatatggaagtgattgactgcggcgtcgctgttttgaatatgcatgccccctgggagattgcaagcaaggtggacatctatgaggcatacaggggctatcaggcatttctaagagacatgtaatggatatcgaaaacagcagaaaaatgttgggaatggaagtttggggtgtacagattctcatttcaatggtagtataatactgtatgatgcaaaatgaaaacaacgaggagaaaaaaacatgtcaaagtttctgaaatttatagtaaacctgattgtgatatgtgtggtcctggtagcagggatgctgattgttccgcctcttttaggggtggatacctttatgatagatgatgtgagtatagattcgaaccttcctatgggatccgtgacttacgctaagagggtgaaaagggagaacctttcagccggagacaagattatgatccaggacggaaagcaaatctatgaataccaaatcgcggatatggatgccaccgcgggttcctatactctgaagaatccgcgcaattccaagtcagaagatcagactgtagcacttaccgccacggtggctaagccggttttgaccgtgccctttatcgcttatgcggtaatggctctccaaagcaaggaagggctgattatcattggacttggtgttatatttctcattattcttttcgtgctggctgagctgtggaaaaaggatacggacgaagacgatgaggaagaggactacgaagatgaggagtatgaagaagacgaggaagatgacgaggatgagccaaagagcagacgccagttaaaaaaagaagctaagcgggctgaaaaagaggcgaagaaagaagccaggaggcgccgcaaagagggcctggacgatgaggatgaggaagaagaactgcctcctccggtgagaagaaagccggcggcccagcctctgacggagaaaccggctgctgcatctgcggacgcagtccttgaggagacactggcttccattgcggcgggagttgcgggagtgaaggagtcagaagttcctgtacaggaggagattgtcttccctcagagagaggaagcggctgcggataactccaaaactatggttatgccccaggcagaagaactcaaggaagctgtcgctgagaaagaagctgcacctgagaggccaaagacaacgaatatgccggagccagaacagcgcaaagaaaaaatacgtcatacaccttctgctcaggaattgctgaacaaagcaagccgaagcggagaagaaccaaaagtggaggaagataaggacgccggagttacactcctagactatacggatttgttgtagagaatacaccctgcatggtaacgtgcagggtgttttgtatgagtttcttctatattaaaggtacgtttagagtggtttgccggagacttttgacacctgcaatcatgcttaagaggaacagtatgaaaaaaatgtattttttgtaaaaaaactcttgcaatattttggattatcctgtatactgattactgttgtgacattgatagcgatgaagcgtgaggttgctgcatgaattgcaggttttccgtggagcgaatgtcaagttaagaaactggcgacaagtcactgtacaagttgaaaatgtctatcgaatcagaagaacaggtagaaactacgtgtgaaacattttatgacacacacgggaatgtgtacagtcaccgcttgtcgtactgctaataagtgcgaaaaggaggcgactttttttatggcaagtcaagtaatgagaatcacattaaaagcttacgatcatcagttagtggatgcgtctgcaggcaaaattatcgaaactgtaaaaaagaccggatcagtagtgagtggaccagttcccctgcctacaaagaaagaggtagttacaattcttagggcggtacacaaatacaaagattccagagagcagttcgaacagagaactcacaagagactcatcgatatcattacaccaacacagaaaactgtggatgcgttatctcgtttagagatgccggcaggtgtttacattgatattaaaatgaaacagaaataatagtgaaagaaattatcctacaaggttgatatataaatgaaaacgccacacgactaagttcaaaaggacttctctaagtgttgcggcgtacgtttgcactaggttcgaaagaacctcaccaagtgcttacagtatattaactttctgtctaggatgattgcacaaaacagtgtaatccgctgtagattaaacaggaggtaaaaaaatgaagaaagcaatcttagctacaaaagtcggaatgactcaaatcttcaacgatgacggagtgttaactccggtaactgtattgcaggcaggcccttgtgtggtaacccaggttaaaacacaggaaaacgacggatacagcgcagtacaggttggattcggcgacaaaagagaaaagttagtcaacaagccaatgaaaggacagtttgagaaagcgggagtttcctgcaagagattcgtcagagaattcaaactggacggagcggaagaatatactttgggacaggaaatcaaagttgatgtctttgaggcaggagacaaagtcgatgccaccgctacttccaaaggaaaaggattccagggcgcaatcaagagacacggacagtcccgcggacctatgggccacggttctaagttccaccgtcatgcaggttccaacggcgctgcatcagatcccagcaaggtgttcaagggcaaaaaaatgccgggccagatgggtaacaaaaagatcactgttcaaaatctggaagttgtaaaagtagatgcagaaaataatctgttattagtaaaaggtgctgtaccgggacctaaaaaatctttagtgacaatcaaggaaactgtgaaaactgttaaataagtttttttcaggaaaggaggaacacacagatggcaaacgtatctgtttttaatatggaaggcaaagaagttggaacaatggatctgaatgacgcagtgtttggtgtggaaataaacgatcacttagttcatttagcagttgttcgtcagcttgcaaataatcgtcagggaactcagaaagcaaaaacccgttcagaagttcgcggcggcggaagaaaaccatggagacaaaaaggaactggtcatgcaagacagggttcaaccagatctcctcagtggacaggcggtggagtggtatttgctcccacaccgagagactatgatatgaagatgaacaaaaaggaaagaagagcagcgttaaaatcagctcttacatccagagttcaggaaaataaactgattgttcttgatgaactgaaattagatgaagtaaagacgaaagcaatgcagaatgtattgaacaacctgaatgtttccaaagcattagttgtgttgaacgacaatgacagcaatgtggtattatccgcaagaaacattcctgatgtagtaactgcgttacctaatacaatcaatgtatatgatgtattaaaatataatacagtaattcttacaaaggctgctgttgcttcgatcgaggaggtgtacgcataatggcaaacattcaatattatgatgtaatccttaaaccagtcgtgactgaaaagagtatgaacgctatgggagaaaagaaatatactttcttagtacacccggaagcaaataagacgatgatcaaagaagctgttgagaaaatgttcgagggtacaaaagtaaaatctgttaacaccatgaacaatgacggcaaaaagaaaagacgcggtatgaccatcggccgcacagcaaagtctaaaaaagcaattgttgctttgacagaggacagcaaagatatcgaaatctttgaaggactttaaaactaacggataatgatagagacagcggctgagagaaattaatccattattcagtcgcgtagcaaaacgctaggatgcgttgtaaaacgagaatcgaaaggagagatagtaatgggaattaagacctataacccatatacaccttccagaagacacatgaccagctccgatttccaggagattacaaaatctacaccggagaaatctctggtagtgtcattgaaaaagaacgctggacgtaacaatcagggtaaaatcacagtaagacaccgcggaggcggaagcagaagaaaatatagaatcatcgattttaagagaagaaaagatgatgtaccggcaactgtaacagcaattgagtacgatcccaacagaacagccaatatcgctttgatcacctatgcagatggtgaaaaagcatatattctggctccggatggattaaaagtaggcatgaagattatgaacggctctaacgcagaagtaagaacaggcaattgcctgcctctctcagaggtgccggtcggtacaatgatacacaacattgagctgtatcctggaaagggcggacagctggttcgttcagcaggtaatggcgcacagttaatggcaaaagaaggcaagtacgcaacccttcgtctgccgtcaggagaaatgagaatggttccaatcatctgcagagcatctatcggcgtggttggaaacggcgagcacagccttattaacattggtaaagctggacgtaagcgtaacatgggtatcagacctactgtccgcggttctgttatgaaccccaatgaccatccacacggcggtggtgaaggtaagacaggaatcggccgtccgggcccatgtactccttggggtaaacctgctcttggccttaagacaagaaagaaaaataagcagtctaataaatatatcgtaagaagaagagatggtaaagcattagctaaataaaggaggttagaactaatggctcgttcactgaaaaaaggaccatttgcagacgaaagcttactgaaaaaagtagaagcaatgaatgctgcaggtgataaaacagttattaaaacctggtcacgtcgttctacaatcttccctcagttcgttggacacacaattgctgtccacgacggaagaaaacatgtgccggtatatgttacagaagatatggttggacacaagcttggtgagttcgtggcaaccagaacctatagaggacatggaaaagacgagaaaagatcaggagttcgttaattattcgtagtcgagaaaggaggacttatccatggcaaaaggacatagatcccagataaaaagagcaagaaatgcagtgaaagatacaagaccgtctgctaaattatcttatgcgagaatgtcagtacagaaagcttgttatgtattagacgtaatccgcggcaaagatgttcagacagcgcttggtattttgacatataatccaagatatgcatccagcgtaatcaaaaaaatattagaatcagcaatcgctaatgctgagaataacaacggaatgaatgttgagaatctttacgtagctgagtgctatgccaacaaagcaccaactatgaagagaatcaaaccaagagctcagggtagagcatatagaattgagaaaagaacaagtcatatctctatcgtattagatgaaagataaggagggcaaacatgggacagaaagttaatccacacggccttagagtcggtgtgatcaaagactgggattccaaatggtatgcagaaggcgattttgctgactatttagtagaagactataatatcaggactttcctgaaaaagaaattatacagtgcaggtatctctaagattgaaatcgaaagagcttccgacagagtaaagattatcatttatacagctaagccgggtgtagtaatcggcaagggcggatctgagattgagaaagtaaaagctgaacttcagaactatacagacaaaaaattagttgttgatatcaaagaagtaaagagaccagacaaagatgctcagttagtagcagaaaacattgcattgcagttagagaaccgtatctctttccgccgtgctatgaaatctactatgtccagaactatgaaggctggagcaaagggaatcaaaacttccgtatccggacgtctcggcggagctgatatggcccgtacagagttctacagcgaaggaaccattcctcttcagactttaagagcagatatcgattatggcttcgctgaggcagatacaacctatggtaaggtgggtgttaaggcttggatttataatggcgaagtacttccaactaaaggaactaaggaagggagcgataaataattatgttaatgcctaaaagagtaaaacgtcgtaaacaattccgcggatccatgaaaggaaaagcattaagaggaaataaaatcaactacggtgaatacggccttgttgctacagaaccatgttggatcaagtcaaaccagattgaggcagcccgtgttgccatgactcgttacattaagcgtggcggtcaggtttggattaagattttcccggataaaccagtaacagcgaaaccagcagaaacacgtatgggttccggtaagggagctttggaatactgggtagcagtagtgaaaccaggccgtgtaatgttcgaaatcgcaggtgtttctgaggaaacagcccgtgaagcattacgtcttgctatgcacaagttaccatgtaaatgtaaaatcgtttctcgcgcagacttagaaggcggtgataacagtgaaaattaataagtatgtagaagatttaagaacaaaatcagctacagaattacaggaagaattagtagctgctaagaaagaactctttaatttgagattccagaatgcaacgaatcaattggacaatacaagcagaatcaaagaggttcgtaaaaatattgccagaatccagacagtgatcgccgagatggctaatgctgctgagtaatcaaaggaggcataaatcgtggaagaaagaaatcttagaaaaacacgtactggtaaagtagtgagcaataagatggataaaactatcgtagttgctattgaagaccatgtaaaacatcctctttacaagaaaatcgtaaagagaacctataaattaaaagcgcatgatgagagcaatgtatgcaacatcggcgataccgtaaaagtgatggaaacaagacctttatccaaggataagagatggagacttgtggaagtagtagaaaaagttaaataatttgatagataatttacgaaaattcgtgaaggaggaataccagcatgattcaacaggaaagtagacttagagttgctgataacaccggtgcaaaagaaatcctgtgcatcagagttatgggcggttctactagaagatatgctaatatcggcgatgtgatcgttgctactgtcaaagatgcaacaccaggtggagttgtgaaaaaaggcgacgttgtgaaagccgtagttgttcgtactgtaaaaggcgctcgccgtaaagatggttcttacatcaaatttgacgagaatgcagccgttattattaaagatgataaaacaccaagaggaactcgtatttttggaccagtagccagagagcttcgtgaaaaacagtttatgaaaattgtttccttagctccggaagtattataggaggtactctaatgtcaacatttaagattaaaacaggcgatactgtaaaagtgattgccggcaaagataaagataaagagggtaaagtaatctctgtgaatcctaaaaacagcacagttgttgtggaaggggtaaacatgattacaaagcatgaaaaaccttctatggccaaccagcagggcggtattgtaaacaaagaagcacctatccaggtttctaacgtaatgtatctgcacaaaggtactcctaccagaatcggtttcaaggtagagggcgacaagaaagtgcgtattgctaaaaaaaccggagaggttatcgattaattaggagaggaggccattcaaagtgagcagactgagagagatgtacgaaaatgagatcgtagatgctatggtcaaaaagtttggatataaaaatgtcatggaagtgccaaaactcaataagatcgttgtaaatatgggtgttggtgaagccaaagacaatgcaaagctgttagatgcagcagttgcagatatggaactggtaacaggacagaaagcagttctgacaaaggcaaagaattctgttgctaacttcaaaatcagagaaggaatgccgatcggttgtaaagtaacattaagaggcgagaagatgtatgagttcgcggatcgtcttatcaaccttgcattaccgcgtgtacgtgacttcaggggtgtaaaccctaacgcattcgacggaagaggtaactacgcactgggtattaaagaacagttgattttccctgaagtggaatatgataaagtcgataaagtaagaggtatggatgttattttcgtaacaactgctaagacagacgaagaagcccgtgaattattgacattattcaatatgccgtttgcaaaatagaataggagggaaatttcatggctaaaacagcaatgaaaatcaaacagcagcgtaaacctaaattctctacaagagaatataaccgttgcagaatctgtggacgtccacatgcatacttaagaaaatatggaatctgcagaatctgcttccgtgaattagcatataaaggacagattcctggagtgaaaaaggcaagctggtaggcaagccccgtagaaatataaggaagaaggaggcaacttcaaaatgacaatgagcgatccaatcgcagatatgcttacaagaatccgtaatgcaaatactgcaaaacatgataccgtcgatgttcctgcatctaaaatgaaacttgctattgcagatatccttgtgaacgaaggttacatcgcaaaatatgatatcatcgaagatggcaattttaaaacaatccgtatgacattaaaatacggtgcagataaaaatgaaaaaatcatcacaggtctgaagagaatttccaaaccaggcttacgtatctacgtaggcaaagaagaactgccaaaagtacttggcggcctgggaatcgcaattatctctacaaaccagggtgtaatcaccgacagagaggcaagaaagcgtcaggtaggcggagaagtcctggcatttgtctggtaggctgtgaacacttagtgaatgcaagccgcaggcgcagtatgaacttagtgagaacgcccgtcgcgaaccttagagagtctgagccaaaggcgacagacgaacttagttgagcgacgtgtaaatccattgcttcacactatattaacaaatattatctaggtttttcacatttagcctatataataaaaaaggtgcggtcaatccgtacctaaacaaatcactgaaaacagaagggaaccacataagcgtcccttccgaaaatctaagtaaggaggaaaatggtatgtcacgtatcggaagactgcctgtagttgttccagccggcgtagaagttaaaatcgctgagaacaacgtggtgactgtaaaaggtccaaagggaacacttgaaagagcgttgccagtagagatggaaattaagttagaggatggtcaggtaattgttacaagaccaaacgatttgaagaaaatgaaatctttacacggtttaaccagaagtctggttcagaacatggtaaccggcgtcagcgaaggttacgctaagattctggaagtaaacggtgtaggttataaagttcagaaacagggtaagaaattagtactgtccttaggctactctcatccagtagaaatggaagatccggaaggattagagtccgtagtagatggaaataagattactgttaagggtatcgacaaagaaaaagttggccaatacgcagctgaaatcagagacaagagaagacctgagccttacaaaggaaaaggtattaagtatgctgatgaagttatcagacgtaaagttggtaagactggtaagaaataattaaggagagtgtaaaaatggttagtaaagtatcaagagcgaaagttcgcgcaaaaaagcatagaagattacgtaatcatctaagtggtacagctgcaactcctcgtttggctgtattcagaagcaataatcatatgtatgctcaaattattgacgatacagttggaaaaacactggtttccgcttctacacttcagaaagatgtgaaagcagagttagagaaaaccaataacgttgacgcagcagcatatttaggaaccgtaatcggtaaaaaagcagttgaagcaggtattaagcaggttgtctttgacagaggcggcttcatatatcagggtaaaattcaagcattagcagacgcagccagagaagctgggttagaattctagaaaaggaggtcaagaacacatgaaacattctattattgatgctagtcaattagaattagaagaaaaagtagtatcaatcaagcgtgtaacaaaggttgttaaaggtggtcgtaacttccgtttcacagctttagtggttgttggtgatggcaatggccatgtaggcgctggtttaggaaaagcaactgagattcctgaagcaatccgcaagggaaaagaagatgcaatgaaaaaattagtgactgtagcgagagacgacaagggaagtattacacatgacttcatcggtaacttcggaagcgcatccgtattattgaagagagctccggaaggtactggtgttatcgccggcggcccggcccgtgcggtaattgagttagctggtattaaaaatattcgtaccaagtgcctgggatccagaaataaacagaacgtagtacttgctaccattgcaggattaagtcagttaaaaactccggaagaagttgcaaaactccgcggaaaatctgttgacgagatctttgcataaggaggattagaaaatggcagataaattaagaatcacattagtaaaatccacaatcggagcagttccaaagcacaaaaaaacagtggaagcattaggcttgagaaagctgaacaaaactgttgagatgccggacaatgccggagttcgtggaatggttcaacaagtaagacacttagtgaaagtggaagaaatttaatacaggttaaggaggtgccataatggatttatcaagtttaaagccagcagaaggttccagacagagcgataacttcagaagaggccgtggacacgcttccggaaatggtaagacagccggtaaaggccataagggtcagaaagcacgttcaggcgctaaaagagtaggctttgaaggtggacagatgcctttatatagaagaattccaaagagaggctttactaatagaaatacgaaagatatcgtagctattaatgtaagcgctctggaaagattcgaggacggtgcagaggttactgtggctgctttattagaaagcggagcaatctctcatgcgagggatggagttaagattctcggcaacggggagctgacaaagaaactgaacgtaaaagtaaacgcagttagcgaaggtgctaaagctaaaattgaagccgcaggtggaacagtagaggtgatctaatgttaaagactcttcaaaatgcttttaaggtcaaagatattagacgtcgaatcctttatgtgttaatgatgttagttgtgatccgtatcggatcacagcttcctatccctggtacaaacccggacttctttaagaactggtttgcacagcagtccggggatgcattcaatttctttgatgcatttacagggggatctttcacccagatgtctatctttgcactgagtatcactccatatatcacatcatccatcattattcagcttctcaccattgcaataccgaagctggaggagatgcagagggatggagaggacggaaggaagaaattgactgctatcacaagatatgtgacagtaggactttccatatttcaatctgttgctatggcaatcggattcaagggtaacataattgatgatttcaactttgtcaatgcagctgtagtagtggtatgtttaactgctggttctgcaatgcttatgtggataggtgaacagattacagaaaagggtgtgggaaatggtatttccatcgtattgatgatcaacatcgtttccagaatcccaagtgaccttatgagcttgttcgagagttttgtaaaaggcaagacgattgccagaggtgcgttagctgcagtgattattcttgcaattattttggtagtaatcgtgttggtgctaatcctgaatggcggagagcgcaagattccggtacagtattccaagaaaatgcagggaaggaagatggtgggcggccagtctacgtttattcccttaaaggtaaatacatctggtgttataccgattatctttgcatcctcgctgatgtctttccccacaattattgcagctttccttgggaaaaccaatggtacgggaattggcagccagattatgaaggctcttacatccaacaactggtgtaatccaagtcagcctgtgtacagtttgggattattgctgtatatagttttagtaatcttttttgcttacttctatacatctattactttcaatccattggaaatagcagataatatgaagaagcagggcggatttatcccgggtattcgtcccggcaagccgaccacagaatatctgaataaaatcctgaattatattatttttatcggggcaaccggattgattatcgtagccgttatccctatcttctttaacggtgtgttcggtgccaatgtttcctttggaggaacgtctatcattatcgttgtaggtgttgttcttgagacaattaagcaggtcgagtccatgatgctggtacgtaattacaagggattcttaaacgattagaaacagacgcgggatttcatatatggtgtacccacattttcgtgggtgcactaaaatgctattgagacttaattttagatgtatacagggaggtataagtctatgaaagttatcatgctgggagcaccaggtgcaggaaaaggaacgcaggctaaaaaaattgcagcaaaatatacaattccccacatttctacgggagatattttcagggcaaatattaaaaacggaaccgaactgggcaaaaaggccaaaacctatatggatcagggacttttggtgccggatgagctggtggtggatcttgtggttgacagggtacagcaggctgactgtgaaaacggctacgttctggacggatttccgaggaccatcccacaggcggaaagtctggatgaggctctgaaaaagctggatcagaaaattgattatgctattaatatagaagttcccgatgagaatattatccgccgtatgtcggggcgcagggcatgtgtgggctgcggagcaacctaccatgtggtctacaatcctccgaaaaaggaagatgtgtgcgatgtatgcggggaaaagctgatcctgagagacgacgatcagccggatacagtaaaaaaacgtctggatgtttatcatgaccagacacaaccgttaattgactactatgaaaagtcagacgtattaaaagaagtggacggcactatggatatggaagacgtattcagggctatcaccgccatattaggagcttaaacaatgtcagtatcgattaaaactgctagagagattgaacttatgagaaaggccggacagctgctggagcaggtgcatgatgaactggaacggtttgttcgtccgggcatctccaccctggatattgatcactatggagagaaattaatccgggatttgggatgtgtacctaattttctgaattataatggttacccggcatctatctgtgtttctgtgaatgatgaagtggtgcacgggatacccaataagcatcatatcttaaaagatggggacatcgtcagtctggatgccggcctgatttatcaggggtatcactcggacgcggcacgtacccatgcagttggaacaatcagcgcggaagctagaaagctgatagaagtaacaagacaatccttcttcgaaggtatcaaatatgccagggcaggaaatcatctctacgaaatctctgctgctattggtgcctatgccgagagcttcggctatggcgttgtacgcgatctggtaggacatggaatcggaacgcatctccatgaggacccacaaattcctaattttccccagaagcgcaggggaatccggcttcagcccggtatgacactggccattgagcctatgattaatcagggcagggccgatgtggcgtggctggatgatgactggacggttgtcacggaggacgaatccttatccgcacattatgaaaatacggttcttattacagacggggaacccgagattctgactctcagcaggtagacggcttatggtagagttgagaaaagggatgcttgccaaatcaaaagccggtcatgatgcgggaaaagtatttgtcataaaacaggcggattcggaatatgtgtatctagtggatggccgcagccggacgctggaccatccaaagaaaaagaaaagaaagcatattcaggtgatttaccgcaccccgtttacactggaagaggtatttgcggcaggcaaaggggttaccgacgaaacagtcaagaaagcaatcaaagaatataataagaatgttcttacagaacgtgtatgagagataataggaggattatatatgtcaaaggcagatgttattgaagtagaaggtactgtattggagaaacttcccaacgcaatgttccgcgtagaactggaaaataagcacgtagtgctggctcatatcagcggtaagctcaggatgaactttattcgaattttaccgggtgataaggttaccattgaattatccccatatgatttgtcaaaaggaaggatcatctggagagataaataaaaaagtttccattttgtgcaaaaattgcttgcaatttgtgttggacaatgataaaatataaaacgaacttttgtgctggcatatgaagatatgcccattgacgcattaagaaaggagggttaccagtgaaagtaagatcatctgtgaagcctatttgcgaaaaatgtaaaatcatcaaaagaaagggtagcatcagagttatctgtgaaaacccaaaacacaaacagagacagggctaattctattaggcttgcttttgtgtgcaaggagttaatgaaataaactcctaatttttatgtgcggctgcagtatgaaccaccaggaggtgttgttcatatttgttcaaatatatggtgaaaattgtttatcctgtccagaaatggatatcctttatatattccgggacagacatgattattcacgtaatattggcgtaataccgggagaccggaaaggtcgcggacttgtctgcggctgggtgtgaaaatgccccgtcagcttttcatacctcaattaggtaacaatattaacacagaatccggcggaaacgcacacatttcaggcataagctatgcttatgagctgcgacaggctgggatctgcagtagaaaatggaggaataatcacatggctcgtatagctggtgtagacttaccaagagaaaaacgtgtagaaatcggactgacttacatctacggaatcggcagagtaagcgcaacccgtattttagaagaggcaaaagtaaatcctgatacccgtgtcagagacttaacagacgaagaagtaggaagaatccgtgacgtaatcgatgagacacaggtagtagaaggtgatttgagaagagaaattgctctgaacatcaagagactgcaggagatcggatgctacagaggaattcgtcatagaaaaggactgcctgttcgcggacagaagacaaagacaaatgccagaacaagaaaaggtcctaagagaactgttgctaacaagaagaaataagcagcacccgtaactgaatgaacaaagtaaatgagaaagtaggttagtttaaaaatggctaaagttacaaagaaagtgacaaaaaagcgcgtaaagaaaaacgttgaacgcggacaagcacatatccaatcatcttttaataacacaattgttacattaacagatgctgaaggaaatgctttatcatgggcaagtgctggtggtctgggatttagaggttcaaggaaatctactccatatgcagctcagatggctgcggaaactgctacaaaagcagcgttagtacatggacttaaaactgtagatgttatggtaaaaggaccaggatcaggaagagaagcagcaatccgtgctcttcaggcctgcggtcttgaagtaacaagtatcagagacgtgacaccggttccacacaacggatgccgcccaccaaaacgcagaagagtctaataggaggtagtatatacaatggcagttaatagagtaccggttcttaaaagatgcagatcccttggcctggatccagtttatttaggaattgacaaaaaatcaaccagacagttaagaagagcaaaccgtaagatgtccgaatacggacttcagttaagagaaaaacagaaagccaaattcatctacggtgttctggaaaaacctttcagaaactattatgaaaaggctgataaaatgcaggggatgacaggtgaaaacctgatgactctgttagagcttcgtttagataacgtaatctatcgtatgggacttgcaagaacaagaagagaagcaagacagatcgttgaccataagcatgtgatggtaaacggcaagcaggttaacattccttcttaccttgtatctgtaggcgataccatcgagattaaagaaaaatgcaaatcttctcagagatataaagatattttggacgttacagcaggaagacttgttccccagtggcttgatgtagatcaggaagctttaaagggagaagtgaaagaaatgcctaccagagaggtaatcgacgttcctgttgatgaaatgttaatcgtcgaattatattctaaataattaaagcatcacactcacggcatatgggtttccatatgcctgttgagacgatgtgcattatgcactgcaaggagggctttgcatgttcgattttaacaaacctaaaattgaaatcacagaaatttctgatgataaaaaatacggcagattcgttgtggaaccacttgagagagggtatggcactacacttggcaattctcttcgcagaattatgctttcttccttaccgggagcggcagtcagccaggtgaagatcgagggcgttctccatgaattcagctctattccaggtgttaaggaagatgtgacagagatcatcatgaacttaaaaagcctggcaatcagaaataacagtgacagcaacgaacctaagattgcatacattgaattcgaaggggaaggggttgtaactgccggcgatattcaggtggatcaggatatagaaatcatgaatccggacctggtaattgccaccttaaacggcggtgctgacagcaaatttaatgcggaacttacaattaccaaaggccgcggatacatcagcgctgacaaaggaaaaacggatgatatgcccattggtgtgattgcggtggacgctatctatacaccggtagagcgtgtcaacctgacggtagaaaatacccgtgttggtcagattaccgactatgataaattaacattggatatctatacaaatgggacattagaccctgatgaggcagtgagtttagctgcaaaagtattgagcgaacatttaagcctgttcattgatctttctgagaatgccaagacagctgaagttatgattgagaaggaagacaatgagaaagaaaaagtattagagatgaacattgacgaattagaactctctgttcgttcttataactgcttaaagagagctggtatcaatactgtggaagagctctgcaaccgtacttcagaggatatgatgaaggttcgtaatctgggccgcaagtcactggaagaggttctcgcaaagctgaaagagctgggtctgcagttaaatcccagcgacgaataaaattttgcccgtcaggcatcccagtgatgccgtgccctgcaggcagggtccggggtaccccttactacacgcctgataggcgtgtgcacggcgtatgccgtaggtttaagtatggaaaacacagcagtctgtcagtaagaccgatgaatgcatggcagattgttccacacaaatggaggaaatataaaaatggcgaaatatagaaaattaggcagaacatccagccagagaaaagctttgatcagaaatcaggtaactaatctgttatacaacggaaaaatcgttactacagaatcaaaagcaaaagaaatccgcaaagtagcagaaggcttaatcgctttagctgtaaaggaaaaagacaactttgagactgtgaccgtaacagctaaggttccccgcaaagacaaagacggcaagagagtgaaagaagtcgttgacggaaagaaagtaactgtattcgatgaagtacagaaagagatcaaaaaagacgctccttccagacttcatgcaagaagacagatgttaaaagtattctatccagtaaaagaagttcctgcggataaagccggaaagaaaaaacatacaaaagaagttgatttagtagacaagatgtttactgaaatcgctcctaagtatgcagaccgcaacggtggttacacacgtattgtaaagatcggacagcgtaaaggcgatgctgctatggaagttcttctggagttagtttaagtcacataacgaaaaccatcaggtgttcccggtaatacgggggcacctttttctttcgtaataagaaccgcgctgccggacaactgaatatatcttgcaggaaatttcccgctatagtaaaatataaacattacagggaagcagaggaaacaattatggcaaagaaaatgttatttatctataaccccagatcggggaaggcgacgattaagaccaaattaatggatattatagatatatttatcaagggtggattccaggtggaggttcaccccacacagggctatctggacgctatgaaggtaacccgggagcgggcgggggaattccatatggtggcctgcagcggaggagacggtaccctggatgaggtggtgaccggcctgataaaagggcatcacaccactcctctggggtatataccggcagggagcaccaatgattttgccagcagccttcacatatccaaaaatatgctgaaagctgctgacgatattgtgcacggagagatgtttgcctttgatgtaggtaagtttaatcacgatgtatttgtgtatatcgcagcctttggattgtttacagatgtggcttatgaaacgaaccaggatctgaagaatattttcgggcacgttgcatatcttttagaagggatgaagcgtctgtatggcatccgttcctatcagatgagggtggaaagcagtgagggaacctttgagggagattttatcttcggtatggtgaccaactctgtctccgtgggaggctttaagaagctgtccggaaagaatgtggagctggacgacggcctgttcgaggctacatttatccgaaagccaaaaaatcctctggaactgcaggagattatctcctcccttcttatggcagaggataatacggagctgatagaatcctttaaaacagaccatctcatcattgagacagaagaggaggtagcctggactttagacggggaatacgggggcgatcacatgaatgtagagatacgcaacagaaagcaggcagccagcatcgctatttcttccaaggaggacatgcagcttctggaggattaagaatactatagtattaaagtcataaatgagtaagtatggtgtgatatgaatggcatcttgttgagtgagatcatactcttcgttatagctttaactatggattcatttgtcataagctttgcttatggaattagtaaatgtaagccctctctgggcgttgtgataatgatgaatggagtctgcagtctggttctcggcattgctctcatagccggaggatttctgggtaccttaattccggactgggtgacgaaacaaatatgctttgtactgcttctgctggttgggggatataaattgattgcagcctgcagaaagaaagagactgtggatcagacagagataaaagaactttcctggacagaaggatttttgctggcactggccctttcgctggacggtttagttgcaggggtcggggccggccttttatattcaaataaactgcttcttgtggcctgctcgttcgtggccggtatcgctgttatgcttctgggatggatgctgggctacagatgcaggcattttatccgccgggatttatcctggatcagcggggcctgcctccttctgctggctcttcggactatcatgggagtataaagagcagaccggataatgcacagaatgtgcgcattgtcgtttttactaaaaagaaaattaaatgttcattagatttatataaaatgcgacaaaataagaaatttgcgaaaatccccttgcatttttagtgtttttgcggtatcttaataccagattggaaatgacattccagtaaatgtgtacgagtgaacaagggcgttccacttttagtggatcgccctctttttgtttaaggcccgtacagaaataatgtttgaaaggatggaaggtatgagtgaatttacaaatgtagtggagatattcggggaaaatgtgttcaacgattccgttatgcaggcccgtctgccgaagaaagtttataaagagttaaaacagaccatcgaagaaggaaaagacctgaccttagaaatcgctgatgtggttgcccatgagatgaaagagtgggccatcgaaaaaggagctacccattatacccactggtttcagccattgacgggcgttacggcagagaaacatgattccttcattacggctcccaaggaagacggaaaagtcctgatgagtttttcaggcaaagaattaattaagggtgagccggatgcttcttccttcccatcaggaggattacgggcaacctttgaggcgaggggatatacggcatgggactgcacctcaccggcatttgtgcggcaggatgcggccggcggaaccctctgtattcccaccgcattctgttcctacaccggggaagcgctggaccagaaaacgcctctgctccgttccatggaggctattaatgaacagagtctgcggctgctgaagctttttggaaatactacctcaaaacgtgtgacaccttcggtaggtccggaacaggaatatttcctggtagacgaaaagaaatttctgcagagaaaggaccttatatttacaggcagaactttatttggagcaatgcctccaaagggacaggagctggatgatcattatttcggaaccattcgccagagaattgcaagctttatgaaggatgtgaaccaagaactctggaagctgggggtttcttccaagacacagcataacgaggtggcgcctgcacagcatgagctggcacctatctacgcaaaggtaaatattgcggtggatcacaatcagctgattatgcagacgttaaaaagagttgcctgtcagcatggtttgaaatgtctgttacacgagaagccgtttgcaggggtaaatggttcagggaagcacaacaactggtcgctgactacagatgacggcattaacctgttagagccgggaaagacccctcatgaaaatgtacagtttcttctggttctcagctgtattttaaaagcagttgatattcacgcagacttgctgagagaatcagcggccgacgtaggaaatgaccacagactgggagccaacgaagctccgccggcgattatctccgtatttctgggagaacagctggaggatgttctggaacagctggtgagcacaggatcagccacccacagcattaaaggcggaaagctaagcacgggagtccgcacccttccagacctgtataaggatgccacagacagaaacagaacctcaccgtttgcatttaccggaaataaatttgagttccgtatggttggatccagggattctgttgcaggacccaatgtggttctgaacacaatcgttgcagaggcattccgggaagcctgcgatattctggaggcctctgatgattttgagatggcagttcatgatattatcaagaagaactgtgcggatcaccagagaatcgtgtttaacggcaacggatattccgaagagtgggtaaaagaggcggagagaagaggtcttcctaatattacatccatggtggattccattccggcactggttacagataaaacagttaagctttttgaagagttccatgtattctccaaggccgagctggagtctcgggtagagattaaatatgaatcctacgccaaggctattaatatagaggctagaactatgatcgatatggccggaaagcagattattcctgcggttatcaaatatactacaacattggcagaatccatcaatgccgtcaaattggccggagatgtggatgtcagtgtgcagacagagctgctgacggagacatcctcccttttgaaagaaactaaagaggcattaaagaccctgatccgggttacggaagaagctgcagcaaaagaggagggctgtgagcaggctacatatttcagagatactgtattcccggctatggaggcactgagagctcccgtggataaactggagatgattgtagacaaggaaatatggcctatgccgtcttacggtgatttgttattcgaagtataaagtgtaccatatcattttgaagagaacgaggaagttcccagctaagggaacttcctcgttttttataaataaaacaaggaggaatagaggatgaaaaagctggagattgttgttaaaccggagaagctggaagatctgaaaatgattttagatgaatgtaatgccagcggactgatgatcaccaatatcatgggatacggaaatcaaaaagggttcaggcagctgtaccggggggcagaatatcaggtaaatcttctgccaaagataaaggtagagtccgtggtggacgataaggctgccgtacagattattgacaaagtagtggatcggattaatacagggaattacggagatgggaaaatatttgtgtatgatgtggaggatgcggtccgtatccgaaccggtgagaggggagccgaggctctctagaagaataaatattatgaaaaggttatgctgtcaaaggggatagctgtcagataagaggagtctggcaactatccccttttagtatatgtgtgtaaagaaaaagaggaggcgttgtatatgtatttatcagatttgttgggaggcagtacagaggttactgcactggcggaagcggccgaactgctgctgaatattgtatggacattattgggagcattcctggtgtattttatgcaggcaggttttgctatggttgaatcgggatttacaagggcgaaaaatgccggcaatattattatgaaaaatatgatggattttgtattgggaagtctttgcttcttcctgcttggcttcgctgttatgttcgggccggatgcagccggcattattggaacttcgggcttctttcagccaactgctctggcagatgcaaatgggatgtaccggggacttcctatcggcgtgttcatgatttttcagaccgtattctgtgccacatctgctactattgtttcaggcgctatggcagagcgtacgaaatttgtttcttatttgatttacagtgcggccatcagtattttcatttacccggtaaccggccattggatctggggagacggatggctggcatccataggcttccatgattttgccggatctacggcagtccatatggtgggtggtgtctgtgctctggtgggtgcaaaaatcattggtccgcgtataggaaagtacggttcagacggaaagccaaaggcaataccgggacataaccttcctatcggcgcactgggtgtatttatcttatggttctgctggttcgggtttaactgcggctccaccacaggcgcttccactaatctgggggatattgctatgaccacaaaccttgcagctgcggcagctacacttgctgcactgtttatgacctggattcgttatggaaaaccagatgtttctatgacactcaatggatctttggcaggactggtagctattaccgcaggctgcgacgtggtttccaattactctgccataatcatcggcctggctgcaggaattgccgtggtacttgtaattgaattcattgaccgcagactaaagattgatgacccggtgggggccatcggggtccacggcttctgtggactgctgggtaccatactgacaggagtattcgcattcgaaaactcagggattaagctctcaacacagatgattggcgtaggggcggttctggtgtatgtgctggtacttgcatttcttgtattcacagtaattgataagacagttgggcttcgtgtatcggaagaggaagagagagacggactggatgtacacgagcatggggcaccggcgtatgcgaactttaatctgcacagagataaataaaagatttggagagggctgtaccgggaggtatggctctttttattacataggaaactgctgtctgcggcagcccgccgcaggcggagattgcgctttcgcacaatctttcttgtttggttagtgtacattctggataatttaagttataatagaggaaggcaaggaagatggccgtaagcggccgcgctccggtgcgcgagtccggcttgccggacgcttttttatagaagaaacgaatcagaaaggataagagatgataagagaactgcaatttttacaggatcagggagtgaatccttttttaatacagggggtggaggaattccgcaggcaatacgcggttgcggatgaggtgaagtccagaattgttgcacctagtattcctttttacggcagggaagttctggagatggccattgccgccttactggaaggggagaatctgctgcttacaggatctaaagctacgggaaagaatgtgctggcggagaatttggcgtttatgttcggaaggccgtcctataacgtgtcgtttcatgtgaatacaaacagcggagatttgattggcacggatacctttcggaataatgaggttgagctgagaaagggaagtatttaccagtgtgctcagtatgggggatttgggatcctggacgagattaatatggcgaagaatgacgcggtttccgtacttcacgcatccctggactaccggagaaccattgatgttccgggatatgacaagatcgatctgcacggggctgcccggtttataggaaccatgaattacggttatgcggggacaaaggatctgaacgaggcgctggtgtccaggtttctggtaattgatatgccgggacagagtgaggagaccctggaatttgtatttaagaatatgtttcccggactgaaggacgaggcgctgaaacagtggattggactttttctggatctccagcagaaggcggcaaacggggagatttccacaaaggcgttggatcttagggggatgattgcagccctgaaaacgattcagtgtggattatccccggcattggcggtgcagatgggggttgtgaataagtgctttgacattttcgaaaaggaaatagtacaggatgtggtgactaccaggattccggaggcgtggacctcaggagaattcttttgactcatagcggagggtgctgatggaagaacaatatacagaatatcagctggaattggaaaacagaataaagaaccttatgtggacggtgagcggtgactacagtctggagattaaggcagacgtggatacttttctgcgttccaaagatattgccctttatgacggagtaaaacagggtgcttttgcgaagtattatgacagggacgcactcagtttatatctcgtcaaaaaggttttccttcaggcccaggaggctccgctgatgacagtggcacagatgtgcattgaacaggcggtgtaccagagaatactggaggaacgaaaaggggttgccgatatcaggcggcgggcgtacagggatatcttagaagaggaattcacagctctgtcgggaaatcctctgggacatttaaagatcgccctccttaaagaagggctgcaggggacataccaggtgccaagaaataccaggagctggatggaggaaatttacagcctgagccaggctgaagataccatggccattatcagagtcattgaccgcctgtataatgcgcttgtggagccggattttgagaaacggaagggcagtctgcagaaggtactggatatcaccctggaggaactgacagaatactcatggaaggactttctctcagaggaaatgtatgaagagactctggagagttacctggaaaaggtaacggagaccatgacacagatggaagtatttcaggaggaaaaagaagaacaggcccccccggagcattcactgcagaaaaagatagtgattgtggacgaggaagcccttcaaaagatgtatacctatgtggaacgcaactatgggattacttatctaagccctgcggaggaaaaatcgctgaattaccagctttgcagagggattcatggagactgcagcctgtattttacagaagggattctgaaacatcctgcccttcggaattatcagtatgaatacgccagaaagcagaaggataaaaatctttttgagtattatgacaatcaccgggtggttaaaagaaatatagttatattaagcgatctcctgaaaaaggcattcgttatgagagacgaggtacaggaagtgctttctgacagaggaactattgtcccttctcttttgtggaaagtggggaggacacaggatgcaaaattattccggagagaactgaaaaatgatgccattgattttgccgtagacgttctcatcgatgccagtggatcccagcgcagccgtcagggtaaggtggctatgcaggcatacattataagtgaggccctcagcaatgtaaacattccccacagggttatgagcttttgtactttctgggattataccattctccaccggtttcggagctacgatgatgacaggagtatgaacgcaaatatattcgagtatattacttccagcaataacagggacggactggcggtgaaggctgccggccaggggctgctgcagagggaggaagagcataaagtgctgatcgtactcagcgacggaaggccctatgatgtggttatcaacaggcccaacgccagaaatccacagccgtatcagggggaatatgcgatccgggatacagcctttgagatccggaggctgcgaaatctgggggtatcggtactgggagtgtttgccggtgaagaaaaagacctggcaactgagaaaaagatatttggaaaagacttcgcatatatcagagacatcggaaatttttcaaatatggtaggacggtatctgctgaagcagctggaagaagagtaaggggagaatctgtaccagattggtcatacttgaaataaatgtttttttctgctatactccatatattgcaaaataatccaactgatttggagtgactctatggagaataaagttgatatattgggttttctgattgataaatattctgtggacgaaatgctggagattgtgagaagacagtgggatgaacaggggcttttgacctatggcctcatcacaatgaatcttctgatggctgccagagaggatgaaatcctggcaaattatatacagtctctggatttgagtatcatcggtgaaccggaagttctaaaagcagcaaagatagaagaagaagccatgctccaggaggtgacgaatcatgaattcctgggggctttcttcatgtatgtaatcaattacgggaatacggtttttgtactcggagagactaaggaagaggccgatgtcctgaaaaagcatctggaagaaacttacgagggattaaagattgcagcttcagactttctctgcggggagaccgccgacggggaagaccgggtgattaatgagatcaacagtgtatctcccgaggtgattctcacctgttcccagagcctgtccatggagcggtttgctgtggagaaccgcaaaaaggtaaatgccagaatctggatgagtctgggaagccacgcaaatcttcagacagaatcaggtttaaaatcgaactggctgagcaaactattagagaagagcacctttaaaaaaatggttgcccggtataatagtgaaaaaggagaataactgaatcatgttcctgcagcatgggaaatcaaaggtaaagaactatgtttttattacagtaggtacagcattgatggcgctggcaatcaattccatttatgaccccatgaagcttgtaacaggcggtttcagtggtttagccattgttatcaagactgttacagaacctatcgtgacagggggcattccattatggcttaccaatgccatattaaatgtacctctgtttttcattggaataaagattatgggcctgccccttcttgccaaatccctttggggaacggtcagcttatctgtgtggctctatattttgcctgcctttcatttgatttccgatgatttggttttggccgctctcttcggaggtgtaattatgggggtgggaattggctttgtctttctgggacagggcaccaccggaggcaccgatatggtttccgccctgattcagagaaagctgcgccattattccatcgctcaaattatgatgtttgtagacggtctcatcgtgtttatgggagcctgggtattcggactgaacctggcactctacgccatgattgctatatttgttaccgcaaaaattacggatggattgctggagggcctgcattactctaaaatagcttttatcatcacggattcctatgattcggtggcaagggagattatggagagcattgagcgcggggtgacagggatatccgcgaagggtatgtactcaaaagcaaaaaagcagatgcttttctgtgttgtctccaaaaaagaaattgtgccgttaaaagagcttgtggccaggatagatgaaaaggcctttgttattgtgtgcgatgcccgggaggtgctgggggaaggatttatccagcaggaacaaaagaaataaaatgtgtttttttggtgaattactcaatatttcgcatttttactttcttttttcgggattttatattattatatagagtagggttttttgttttttatgggaaaaagcaaggctggcaatacattatataatggaaagagggaaaaagatgatatcaaatcaagtactgcaaaacacattagacggattaaagaacatctcaagaacagaattttgtgtaacggatactgaaggtaaagctttggctacgacatttgcagacactgtatgctcagaggacgaagtcgtagattttattaattctcaggccgatagtcagattatcaaaggatatcagttgtttaaaatatatgacgatcatcagctggagtacgtcttaatcgtggacggtgacagccaggatgtatttatggtgggaaaactcgttgttttccagatccagaatcttctggttgcctacaaagagagatttaataaggataactttatcaaaaacctcttgctggataacctgcttttagtggatatctacaaccgggcaaagaagttacatatcgacattgatgtccgtcgtgtagtatttatcctggaatccaatcaggataaagaatacggttccctggaggggatcaagaatgtgttgggcggcaagaacggagatttcgtaactgccgtagacgagaagagtatcatcattgtaaaagaactgagtcccaccgacggctacgacgaggcggacaaagttgcaaatacgatcttaactgctcttggcattgagaaggacggcaaaacccacattgcctacggtaccattgttaaggaattaaaggaggtatcccgttcttacaaagaggcaaggatggctctggatgtaggtaagattttctttggcgacaaagaagtaattgcatacagttctctgggaatcggccggttaatctaccagcttcccataccactttgtaaaatgttcataaaagagatctttgatgggaaatcaccagatgactttgacgaagagacattaaccaccatcaataagttctttgagaacagcttaaatgtatccgagacttccagacagttatatatccacagaaatacactagtataccgcctggataaactgcagaagagcaccgggctggaccttagggtatttgaggatgccatcactttcaagattgcacttatggtagtgcgttatatgaagtatatggagactctggactactagggtttcggatgcgcaggaacacttaggaggataatatgattgatttaaagggcgttagcaagtcctatgcgaaaggccagccggccgtgaataacgtagacttgcacgtagataagggtgaatttgttttcgttgtaggaaacagtggatccgggaagtccacgttgatcaagctgcttttaaaagagctggatcctacttcgggagtcattacagtaaaccaacagaatctcaataagctaaagagaagaaagatagccaaataccgccgtggggtgggggttgtttttcaggacttccgtttattaaaagatagaaatgtatatgagaatgtggcatttgcccagcgggtaatagaaaagcctacccgtgtgattaaaaaaagagtgcctgaggtgcttaccatggtaggtctagcggaaaagtacaaatcttttccgaaggagctgtcaggtggtgaacagcagagggttgccctcgcaagggcgctggtaaaccgtcctgcgatcctgctggcggatgagcccacaggtaatttggatccgaagacttcctttgagattatgaagcttttggaggaaataaacgaaagaggaaccacagttcttgtcgttacacataacagagagatagtaaatgccatgaaaaaacgggtaattactatgaagaaaggcgtcattgtaagcgacgaacaagaaggtgaatatcattatgcgaattagtaccataggatacacactgaaacagggtgtgaagaacatctttagaaacctgagattttcgctggcttctgtggcaactatggctgcctgcattttcttattcggactctttctggcaattgtcatgaacttcaactccatgcttcgggaagtggaggaaggagttggaattaccgtattttttgaagagggtgccaaacaggaacagattgacaagattggccaggagattaaaaagcagaagggcgtaaaggaagtcaaatacgtatctgcggaggaagcctgggagtcctttattacgcagtattttgacggtgacgatcaggccgctgcaggatttaaggatgacaatccgctggcgaattcctccaactacgaagtatatttagataaaatcgaggaccagacagaactggttgcctatatcgaaggtctggacggggtgagggaggtaaatcactccaaaaacgccagtaccacactgacgagtttgaacagagtggtaggttatacctccattggtatcataattattctgtttgcggttgcatttttccttatcagcaataccatagccatgggtatctctatccggagggaagagattggtatcatgaaactgataggagccactaacttttttgtgcgtgcacctttcgtcattgagggaattcttataggtctggtaggcgcaggtcttcctctgggactggtgtatgtctgctataatcagctgataaagtatatccaggacagattccatgtttttacagccatgggcagtttcctgactgtacagacaattttccatatccttctgcctgtaggattagggctgggtgttggaatcggtctgctgggcagcgcagttgccatcagaaagcatctgcgggtataataatatgattcagaaaggcttcaggggattctccctctgaagccttccggtgtttaaaggagctatgtatgaaagattataaatttttaaaggggttccttttgggagtccttctggcagctgtggtaggacttggaggttatcttggagtaaccaattatatcagtgcaaaagaggcccggcaggaggaaacagcgcctgacagtgccaaagcaaagaaaaagattcagctgctggagacgctcattgatgagacgtatttggaagacgcggatgaggatgcattgacagaaagcatgtatgccggcctgattgatggactgggagacccttattccagatattatacaaaggaagagtataaatcccttacagaagagacagagggatcctaccagggaatcgggattgtcatgcagcagaatcccgatacaggagtgattaccattgtacgctgctatgaaggggctcccggggcagaagcaggtgtccttcccggagatattctgtataaagtggacggggaggaagttacgggtactgaacttgcagaggttgcaaagaaaatccgcagcgaggatacagaatcagcgaagctgactcttgccagggacggagaaaacgattatattgaggtagatgtcaaaaaggcccaggtggagatcccggtagtatcccatgagatgctggaaaaccaggtgggatatatcgcagtctacgaatttacagctgtcacggttcagcagtataatgatgcgtatgcggatttgatggctcaggggatgaaaaaactagtcatagacctcagaggcaatcccggagggcttctcacagcagtatgtgacatctttaacaatatagcgccggagaaactgattgtatatacagaagataaaaatggagagaaagaagaatacctatccggtaagggcacgaacatggatgttcccctagctgttttggtaaacggcaacagcgccagcgctgctgagatctttgccggagctgtccaggactacgggatcggcactttggtgggtactaccacattcggaaaggggattgtccaaaaagtaacgcctcttacagacggaagcgcggtaaagcttaccatatcaaagtactatactccaagcggaaggaatatacacggaaccgggataaccccggatgtggaggtagaactggatgaagccctgaagcaaaaggtgactatcagcaaagatgaggataatcagctgcagaaagcccttgaggtcttgggggaatagaatagagtctgttgtatttctcaaaacactttgttgaagttgggaattaaaaatgttatgatagaaaaaaaacggaggggacatttatgaatgactttgtaataacgacagaaaatacatcggatttgccaaaagactattacagccaaaacggcattacgtatatgtatctgccctgtacaatagatggagtggtgtataataaagagaatgaaatgccttcaggggaattctacgaaaaaatgagaggcggcagcatgcctacgacttcccagattaatcccaacgatgcgaagacagaattctccagaatccttgacgagggaaaggggattcttcatatagcattttcctccggactcagcgggagctataacagtgccaggattgccgccgaggagatccgggaggagagaccagaagccaggattgcagtggtagatacactggctgcttccatgggagagggaatgctggtttataaagctgtgcagatgcagaaggcgggaaaaagtctggaagagaccgctgaatggctggaggcaaataaactgcatctgtgccatatgtttaccgtagacgatctcaatcatctgtaccggggcggcagggtatccaaagcggccgcggttctcggcactatgattaatattaagcctgtccttcatgtggataatgaagggcatctgatcccccttggaaaggtaagaggaaggaagaaatctctggtgactttggtatccatgatggaagagagagtgggatcctatcgggataagaatgacattattatgattagccacggcgactgtctggaagatgcagaatatgttgctaagctggtgaaagaaaagtttggatatgataatattatgattaatcctgtgggagcaaccatcggtgcgcactccggccctggtacagtggcactgtttttcctgggagaatacagataataaaaaacctgcgggcgatatacgcactgcacgcaaaaggaagatggcagcgcttcggcgtgggagtccggcttagccgggctctttttttattacataggaaacttcgttccctatgtaataaaaagccctgtgggggatcacactgcggcggaaaggaagatgctgcctgcgacagcccgccgcaggcggagattgcactttctcgcaatctttcttattgacaggctagtaattattagctatactgaggttatgggctagtaaatactagcctgtgcgaacgaacgtatgattggagcgggaaaacagatggagacatttcggctggaagaatatttaagcaatggagtggaacagatgatcaaaggaattcttaaggcgtctgcagggaaccccagagagagtctttttatggtacagtatgcccggggcggcagaaagagaagagagcttcgcagaaaacgagaggaagagggggtgcatattccgccgtttttgattgccagtattacaaatcaatgcaatctcaactgcaaaggctgctatgcccgggaaaatgagaagagggaagggtttcgggtgaaaagaatgctgacggtaaaagagtggggaaacatttttgaagaggctcaaaaattgggcgtaggatttgtgctccttgccggaggggaacctatgacgagaagagatgtgctgagagaagccggagagtataagggaattctttttcccgtatttaccaacgggacattgtttgataaggattatgcaaaactcttcggaatacataagaacttgattcccattttaagcgtagagggtggggaaggacgtacagatgacaggagaggaggggggatataccgcagagttcaaagaacaatggaacttctgcaaaacagccgtattctctttggagcatcggtaactgtgacaaaggaaaacctggaggaagtgacaggggaaaattttctgaaggaacttcggacacggggatgcaaagggataatatatgtagagtatgtacccgtggacaggaaatctgcctccctggctttagaggagagagaccggcaatatatgaacagcagaatacagaggctgagaaacggccaggacgagatgctgtatatctcttttccgggggacgagaaatcatccgggggatgtctggcagcaggacggggattttttcacattaatgctgcggggaatgcggaaccatgcccattttcccccttctcagataccagtctgctggatatgtccctggaagatgctctccattcccctctttttagaaagcttcagacatccggacttttgactgcacctcatgagggcggatgtgtactgtaccagcatgaggagaaggtagagaacctcctgaagggaggcagcagatgaaaaccagagaacggatcatagaggaggcgctgaaccttttttccaggaaaggctatcagggaaccagtgtaaaaaatattgcagaggctgtgggaatcagggacagctctctgtataaacacttcaggagcaaagaggaaatttttagtaccatagtggaagaaatgtcgcgccgtatggagaaaatgtcacaggctttggggctgcctggggagaagcacatggaggcggcagcgaaagtatacgggaagctttctgtggacggactcttggaactgagcaggaagatatttttgttttatttgaaggatgaattcgcatccaggttccggcggatgctgactattgagcagtattctgacaagaggatttatgaggtatacagaaagatttttatggtagacagtattacttatcaaacagcgcttttccaggaaatgatgaggcagagggtttttagtgagggtgatcctgccgcaatggcaatgaatttttatgcccctatttattttttgctgaacaaatacgaccagatgcccggggccgaggaggaggcgatgggggagttagagcgtcatgtaagggagttctgcagaatctataactgcagaaagggataaaacattaaaaaaggaatgagaacctgtatgcctgttggcaatgacaggacctcattcctttttttgctaaaggggaatggggagaaaatctgtaccccagggcagctgggcgatgacaaaatggatatcccggtaaatctgcaaaaaggctttttccagtgcggcgggcaaagcggaagaatccttttcccggagggccttcaccacatcacgcataagggcctgcagcttctcctgaggcgcatagtaagaggcatccgctgcatacagataatagccccacaggagcagctcattcagctgagaatagatgttgctcagagagtggcagggagcaaactgtatcatataatccataaggagctgaaccgaacggggattgagactgtggagagaggcagagaataacttttcttctgccctgtgcagccattcctctgtgacaggggtgaaggattttgcgcagattcctgcagacagagccataatctggatggtatccatacagagagccagtctttgctggatcagaggatcactgaaatcgaaagaggcaggggagatgctgccctgaatctctcctgtcaccagaatagttccttttttagcttttgtttcagcaattcccagcatattcagcagagcaatgctgcggcatacagtctccttcatcagcccgtattcttccatcagtctgggaatggaaggaagatatttcttcccttcaaactcccctcccgcaatccgccgaagaatagacatggccaggcgtatataaagttcagaatggcctttggtccggaaccagcggatatctgccttccgcgggaccggggcaggaatcgcgcggctaagttcctcaagataaccgtctatggtactctgggttttacagtaaaagtccagaatactatcataaaacgcgtcatactgtttccggaggattctgtttaatgctgtctccagccaggcttttaccctgctctcagcttgataggagggagcttttaccccaggataaggaatatagggcacatccagataactctcagcatccagttgcagatcctgaatcaggaggttgttaaagggcttgagtacagccctgaaaaaaagattggcctgccgataaagggcagagagctccatgtgaccggcaataccgtctatggcgtcccgcatgattgtaaattcggtctcctgacagagtctggcaccctcccgatagagggccggaagaagaaggccaagtccgcaaaatgcatcattcactccgtccctgcgttctaacagggcggcaatgcaggactctgccgatgcgcggtaggcagaaactgccggccgtccggtaacagtacggatatatccgctgtgttccagcatcttcatgactttccggattgtggtgatccctacattgaactgccggcaaagctgctgctgggaaggcagagtctgtccttcgggatagacaccgcattcaaactgagtgacaaaggagcgataaagatattcgtactggtgtaaattctgacgcaattggcgctttctcctttcgaaaaaatgtattaataaaataagtatatcaactttggtgttcagcttcaacttgctttttacagttacctgcgataaaatatacctatagcctatatgggaaagatgcggcctgaagtaagcggcaggaggtgatggggaaatgaaaaagcgaaactgcattttgattgtggatgatgcagagatgaaccgcgccatgctggcagatatgctgtccggggaatatgatatccttgaggcgtctaacgggaaaaaagcaatcgagataatgcagcggcagctgtttaaaatttccctgattttgctggacattattatgcctgtgatggatgggtttgaagtgctgtcgattatgaacaaatatggctggctgaaccgtattcctgttattactatatcgtcagagacttcatctacctacattgatcatgcatatgatttgggggcaacagactatatcagcaggccctttgacgagaaaactgtacagcggagggtgcagaacacaatagtgctgtattccaaacaaaaggttctggaaggaatggtggcggatcagattgcagaaaaggaaaagaataacttcctgatggtagagattctttcaaatattgtggaattcagaaatggggagagcggccttcatgtgctccatattcgggttctcactgagatattctttcgaaagctgcaggagattactggacagtatcccatgacagtttccagaatggcattgattgtaaatgcttctgcgctgcatgatgtgggaaagatatctattccggaagagattttgaataaaccggggaagctcaccccagaggaatttaagattatgaagacacacagtatacagggggccctcattatggaagacgcactctcacggcatcatgaagaactgcttaatctggcctataatatctgtcgctggcaccatgagaggtatgacggagggggatatccggacgggctgaaaggagacgatattcccatagaagcccaagtggttgctctggcagatgtgtatgacgcactaaccagcatgcgtgtatataaaccggcttactctcacgacacagctatgcagatgatactaaagggtgagtgcggagcctttcatccgcttcttatgcagtgcctggaagcagtcggtccgtatttggaggaagagttgaagatccgctctatgaatcctgtatcagaagaaaatttacagcatttatcaaaccagattatagcggacggccaggtttccgaacgcacccttacgctgctggagcaggagcgggtaaagtatcagttttttgcttctatgtctaaggagattcagtttgagtataattatagcatcgacgttctcaccatgtcagagtggggaggaagccagcttggactgcctattctcatagagcatcccggacaaaatgaggtactgcacaaggtgttctctcagaaagattacatggacctgcagagaaagctgaggaaagctacagaggaaaatccaattgtaagtggtgtatactgtctctgcataaaaggaaatcaccggtggtttaaggctacggcccgccctttgtgggaaggggaaggacaggatgggatctcaggtatcattggaaagtttgtggatgttcatgaggaacagctaaagcttgacaagctgaaaagaaatgcagaacgggatggaatataacagactgtttcactgtgcagaccaggcgctgtatgcggcgaaaagggatggaaagaaccggtttactttttatggatcatgaaagcggaggataggaacatggataaacagaaaagtagtgcagggcagattggatatgaatatgatacactgatgaatcttctccatgtcagcgtcagtaaacatctgctggatgatcatttcacactggtttgggcaaatgacttttattatgaattgattggttatacaaaggaagagtatctggcgatttatcataatctgtgtgatacgtattatatgaatgacgatttggggatacatgatgaggaactgtggaaccagctgggggctgaggtgatccgcacgctgaatgccggggagaacggctataccatggtagcgcagatgcgtcgcaggagtggagaatatatatgggtccgtatgtcggcgaggtttacggatgagtatattgacgggtaccgggtgtcctatacggccatgatggatgtcagtgacatgatgcggatggagcaggagcagtccgttacctatgataatctgcctggttttattgcaaaatacaaagtgggcaagatgctagattttacactgcttgacggcaacgaccgtttctttgagttttttgggaaagagagctggaagaatatggagtaccctctgttccgggacaatgtgctgcgcaatcagtcggtatttgaagagcaccgggaggcgcttctgaagggggagcaggttcattttactgtacatatgagcgatcagagaggtcaggatgcctggctgcagattaatgggtcctgtgtgggacaccaggagggggatccggtatatcttgtaatctacattgatattaccaacgagacggaactccggcagatgcagaggcagctggaggcccaggcaaaaaggctgcgcagcgctctgaaagaggctgaagaggctaaccgggcaaaatcagattttctgtcccggatgagccacgacatccgtactcccatgaatgcaattcttggtatgaaggatattgcggtttcccatatggaggatccggataaagtaaaagattgcctaaaaaaaatcggcctttcgggacagcacctgctgggccttatcaatgacgtgctggatatgtccaaaattgagagcggggagatggctcttagggatgatgtggtatccctgccggaggtacttgaaaatattgtaaccattatgcagccccagtttaaagaaaaagatcaaaagttttctatccgtctccagtgtgtaattcacgaactctttttaagcgattccctcaggctgcggcaaatatttttaaatatactttccaatgcatgtaagtttacccctccgggaggaagcatcaccatggacgtggcagagggcggtacagaagggagaatcactcactttgcatttacaattacggatacaggaattggtatgcagccagaatttatggaacatcttttcaccgccttcagccgggagagagacagcagagtggataagacagaaggaaccggacttgggatggccataacaaaaaagatagtagaactgctggagggaaccattgaagtggagagtgaaccggggaaagggtcggtttttagagtttatctaccattgaaaatcgaggaatctccaaaacttgacgcttctttcccggatttaaaagttattgtggcggatgatgatgcggttatgtgcgaatacactgcagagatgcttcggaacatcggtatctatgcagactgggtggacagtggtgagcaggccgtagcaaaggtgttggaagcacagaaaaagggggaggcatatgacgccattctcctggactggaagatgcccgggcaggacggacttgagactacccgccggctgcgggaggtcagtaagggtaagctgcctatattgattatctctgcttatgactggaacgacatagaacaggaagctaaaatggcaggcgtaagcggatttcttcagaagcctatctttgcgtccactctgatccgggggctgcggcagtatattctgggagagtcaacggatggggagcgaagtgaatcagagcatatatctgactttgaaggcaggcattttcttctggtggaggataatgccctgaaccgggaggtagcccaggaactgctgggggatatgggagcggtgattgatactgcctgtgacggcctccagggggttgaggcttttgcagcttcagaagaaggcttctatgacattcttcttatggatattcagatgcccgtgatggatggctatacggctgcccggacgataaggactctgaaccgtgcggatgccgggacagtgcccattctggcaatgacagcagatgcctttgccgaagatatccaggcagcaaaggatgccggtatggacggtcatctggccaagcctctggacggtgttacactgaagcgtgagattagcaaataccttagttgacatcagaaaacaggtattttatacagatgcaggaatgaaagaacaaatgttccgctgctgcctatacttttctattggtctatgttataattttaaagtataatatccaccaggctttatctggcgcagcaatatatctaggaaaagattttgtgatcttcatttcacggaggtaaaaatacagtatggttaaacaaaggcactcccaagacgcttcgctgcttgctcatgaaaccggcatgaggggcgatattggtttcaaattacactcggaatatcagccaaccggcgaccagccccaggctataagacaactggtccagggattcaaagaaggcaatcaatgccagaccttactgggggtaacaggttccggaaagacatttaccatggcgaatgtcatccagcagattcaaaagccgaccctcattattgctcacaataaaacccttgccgctcagctctacggcgagtttaaggagttctttccggagaacgcggtagagtactttgtatcctattacgactattatcagccggaggcctacgttccatcctctgacacttatatagcaaaagattccgctatcaacgatgagattgacaagctccgtctctctgccactgccgctttaagtgagcggagagatgtcattatcgtatccagtgtgtcctgtatctatgggatcggaagtcccaaggattaccagaatatgataatctccctccggcccggtatggagcgggacagggatgaggtgatccgcaggctcattgacattcagtatgacagaaatgacatggatttccaccgggggaccttccgggtaaggggggatgtgctggagatatttcctgcagattactcagagctggcggtcagggtggaatttttcggggatgagatcgatcggattacagaggtggataccctcaccggagagattaagaatgttttaaaccatattgccatctttccggcctctcactatgtggttcccatggaacggattctggaggcggcaacgaatattgaggaggaattacaggagagggtggcctattttaagagtgaagataaactgttagaggcccagagaatctcagagaggacaaatttcgacattgaaatgatgaaagagaccggcttctgttcagggatagagaactattcacgccatttatccggacttgctccgggacagccgccctataccctggttgattattttggagacgacttccttatcattgtagacgagtctcacaaaacggttccccagatccgcggaatgtatgccggagatcagtccagaaaaggaactttggtggactatggtttccgccttccctcagcaaaggataaccgtcctcttaactttgaagagtttgaaagcaaaattgatcagattttgtttgtctctgctacccccggggagtatgaggaggagcatgaactgctccgggcagaacagattatccgtcctacgggcctgctggatccgaaggtagaggtaagacctgtggagggacagattgatgacctggtaggagaggtgaaccaggaagtggagaagggcaacaaaatcctcattacgacgcttacaaagcgtatggccgaggatctcacggagtatatgaaggagctgggcatacgtgtcaaatatcttcattctgacattgacactctggagcgcacggagattatccgggatatgcgcctgaatgtattcgatgtgctggtgggaatcaaccttctgagagagggtctggatattccggaaattactctggtagctatcctggatgcagataaagaagggttcctccgttctgagacctccctgattcagaccatagggcgtgcggcccgtaacgcggacggccatgtaattatgtacgctgatgtcataacggattccatgcggatggctattgatgagacagagcgcagaagagccatacaggaggagtacaacagggagcataatatcacgccccaaaccataaagaaggccgtcagggatttgataagtatctctcagaatgtagctgaaacagaggataaattaatgaaagatccggagtccatgagcagggaagaactggagaaactgataggtgagatacaaaagcagatgagaaaagctgcggcagatctgaactttgaggcagcggcggaacttcgggataagatgatcgaacttaaaaaatctctggaggaattggacgactgactctggtgagaaggataatttttgctattgttctgttatacagaacaatagcttttatttcataaagaatagaaaaagtgtggtaaaaattgataaaaatatatcacatatacgggaaatatccattaaagtgcacaattgtatttacttttgtacatggctgtgataagctattggtaacgaattgtaccacaaatgtgtgaaatatctaacgattttttgtggggcattacaaaatatactacatattgggaggcggtattatgacttacttggacattggaattattgtcgcttatcttgtgggaatgctgttaatcggtatttatgcaagcaaaaaacagaaaggaattgatgattactatgttgccggaaggaatgtgggcgcattttctctcatgtgcttatggatgtcagcctggattggaggagcatctgtcatgggaacctcatccagagcctacgaaatgggaattacggcaatctggtatgtgggcattattgctgtaggcataattgtttttgcctttgttatggtgaaacctatcaaacggctgggagataaactgaataacctgactttcccggactttattgagaacagatatgattcaaaaacacgggcggcaaccacggtaaccacgatcctggcgtatattgcctatacaggcagccagttcgtggccggagccagtatcctcaatgtgcttaccggttggagcctgccgatctgttttattgtgacaacttttgttattgtactgtacacttccatcggaggctttctggcggtaacctatacggaccttgcacagatgattctgctgttcggggggatcgtattgctgggagtgcccctggccatgcaccatgtgagcacaaacgaattgtccttctctacgctgcctgcatcttattttgacttgggtacctggggatggcctacgattattgcgctgggcatctcaactattttttctttctttacctctatggacagctataccaagtgttttgctgcaaaagatgagaaagctgccaagagaggaacactgatggcggcagcctgtgtgattgttattgcgctgtcttccacctatctgggactcactgcaaagctggtacttccggatcttgcctccagctccaacagcctggcggcactggtcgtagagattttccctgcaggggtaaggggcctggtgctggtaggcatcctggcggccattatgtctacaggagatgtgtgtgtgctgactgcatctgcaaatattacaagagatatctatcagcggtatataaatcctaaagtagaagaaaagaagctcctggtgatgggaattgccagctctttcttcattggcataatcagtgctgtttttgcctggtttaaccaggacatcattgatgccttgtttatagcatttaccattaactccgctggactattcctgcccacggtatgcgggctgttctggaaacgctcaagctctaagggtgccttcctgtctgtattatcttcgctgattattgtggttatatggtacataggcggcatggtgagcagcagtcctattttccagattgaagcactctggccggcgttcgggatctccgcggttatatatctgacggtatgcttaaccggaaaacaaagtcctgaggaaatacagaaggcggaagcttttatagcagctaaaaatggctaatctaaaataatataaagaaatgtatcaaaaacgggggaaggaaggcttgcagccttcctttccgacccttgaaaggagtggggagaatgaaactggtattggcagaatatccagaatccagagacaggagtatcgaggtggaaaaaagatacctgccgccggatacggagatttcctatgcggtggtagatgagggaaacatggaaacctactatgcagctttggcggaggcagatgctgttctgaccggatttgcgcccctggatgaaaccgcaattgaccggatgaagcactgcaggattatttccgtgcaggcaaccggatggaatttcgtggctgatgcgtatgctgcaaaaaaaggaattgccgtgtgcgctgtgggggaatactgcacccaggaggtggcggaccataccatggctctgatgctgggtgtgtgcaggcttatcccctatcatatgcgcagagtcaatcgggatcatgtgtgggagattgagtcgctcaaggacaggaaggtacagagattcggagccaaaacactgggaatcgtaggatttggaaagattgggcgggctgtggctgtccgggcccgtgccttcggaatgaaggtaattgcccatgatccctatatcagtgaggaaacagcagagatacagggggtagagctggtaagcatagaccgaattttggaggaggcagatgtgatttccattcacatgaatcttaccagcgagaatgaaaactattttaataaagaaaagtttgataagatgaagcgtcagccttatattattaacatggcccgcggggcaatgattaatgaggaagatctggcagatgccctggatcgccaagtggtatccggcgccggacttgatgttttgtacagtgaatcaccagaactagggacaagtaagctcattaacagggaaaacgtgatcattactccccactgcggtttctattccgacgatgccattgaggcgtgtgagagaatttctgttcagaacattacctattatatgaaaggggagaaggagaaagtatttaagatagtaaatggaatctgaggcggtgataccagaaaaagaagcgcagaacagccggccggaaaatgcagaacaggcattttccggccggctgcgtttttcccatggtgtacagcttttgtcccgaaacaagtataaaataattataaaccacttgacaaactaaagtctcagtgctatcttaaaaccataggtattagcactccacacaaacgagtgctaacaactaaaagaaaggagcgaagatatgggtagcgatctggatgagagaaaactaaaaatcttgaaagcaatcattaaaacttatctggacaccggcgaaccagtggggtcgcgtacgatttctaagtacacagacctgaatctgagctctgcaacgattagaaatgaaatgtcagatttggaagagcttggttatattttacagccccatacctcggctggcaggattccatcggacaaaggctatcgtctctatgtagatgagctgatgcaggagaaggaggacgagatttccgagataaaagggatgatgattgagaagaccgacaggatggaaaaggttctgcagcaggtagttaaagtgctggcatctaatacaaattatgcaactatgatttctactcccagttatcatcagaacaagttaaagtttatccagctgtccagagtgggtgatatgcagctgctggcagttgtggtggtagaagggaatattgtaaagaatcagatccttgacctggaagagcctatggatgaggaaacagttctgaagcttaatcttctcctgaatacgcagctaaatggcctgaccattgacgaaatcaatctgggtatgattcttgccatgaaagaacaggcaggcatacacagcgatgtggtgggaagcgttattgatgctgtggccagtgcaatccgttccgacgaggatgaagttcaggtttacacaagcggagctacaaatatcttcaagtatccggagttaagcgacagtacaaaggccagtgagcttatctctacatttgaggaaaaacaggcactggttgagcttgttaaggaaagtatgtcaggtgaggagaatacaggtattcaggtatatatcggcaacgaaacacccatacagaccatgaaagactgcagcgtggtgaccgccacctacgaattaggagagggaatgcggggcaccatagggattatcggacccaagcggatggactacgagaatgtagtagataatctgaaaacgttgaaggtgcaattagataatatatttaaaaaaacatagaaaggcggtatagatggtggcagaggaaaaacagacggttgaggaagaaataacagagaaagaagcgatggaacagacggcagaagcccaggaggatgatattcaggaaagcccgggagatacggcagaggggacagaagaagacaccggagaatgcggccaggaggagtctgaagaagcccgggaggcctgtgaagaaaaggaaaagaaaggtcttttcggaaaaaagaaaaaggacaaaaaagatcagaaaatagaagagctgacagatcagctgaaacgccagatggcggaattcgataatttccggaaacgtacggataaggagaagtcagccatgtatgagatcggagcaaaagagataattgaaaagatgctcccgattgtagataattttgagagaggcctgggaggagttcctgaggataaaaaggaagatccttttgtggagggaatgaacaaaatctacaagcagatgatgacagcctttgaagaattaggtgtgaagcctatagaagcagttggcagtgagtttgatcccaatcttcacaatgcagttatgcatgtagacgatgaagaggcgggagagaacgtggttgtggaggaattccagaagggctatttatataaagaaaatgtggtaagacacagtatggttaaagtagcaaactagatgcgcgaataacgtatctggatttatatataaataattacaaataagacttagattcaggagggaataaattatgagtaaaatcattggtattgacttaggtacaacaaacagctgtgtaggcgtaatggaaggcggtaagccagtagttgttgccaacgcagaaggagcaagaacgacaccatctgtcgtagcatttacaaaaacaggagagagattagtaggtgaacccgcaaagcgtcaggcagttaccaatgccgataaaaccatttcttctattaagagacatatgggaactgacttcagggtgaccatcgacgacaagaaatactcaccgcaggagatttctgctatgattctgcagaagttaaaggcagacgcagagaattacctgggtgaaaaagtaacggaggcagttattacagttcctgcatacttcaatgatgctcagcgtcaggcaacaaaagacgcaggtaagattgcaggtcttgatgtaaaacgtattatcaacgagccgactgcggcagctctggcatatggtcttgacaacgagaaagagcagaaaattatggtatatgacctgggcggcggtacgtttgatgtgtctattatagaaatcggcgacggtgttattgaggttctgtccacagccggcaacaacaaactgggcggagatgactttgaccagatggtagctgactatatgatcagtgaattcaaaaaggcagaaggtgtggacttgtcaaatgacaagatggcgctccagagaattaaggaagctgcagaaaaggctaaaaaagagctctcctccgcaaccactaccaacattaacctgccgttcatcactgctaccgctgatggaccgaaacattttgatatgaaccttacaagggctaaatttgacgaactgacacatgagctggtggaaaagacggcagagccagtgagaagagctctttctgatgccggtctgaccgcttctgaactgggtcaggtgctcctggtgggcggttccacacgtattccggcggtacaggataaagtaagacagttaaccggcaaagagccaagcaagacattgaatccggacgaatgtgtagctctgggtgcttctgttcagggcggtaagctggcaggcgatgcaggcgcaggcgatattcttcttctggatgtaactccgctgtcactttctatcgaaacaatgggcggcgtggctaccagattaattgagagaaacacaaccattcctacaaagaagagccagatcttctcaaccgctgcagacaatcagacagctgttgatattaacgtagtacagggagaaagacagtttgcgaaagacaataaatctctgggacagttcagactggatggaattcctcctgcaagaagaggcgtgcctcagattgaagttacctttgacattgacgcaaacggtattgtaaatgtatctgctaaggatctgggaaccggaaaagaacagcatatcaccattactgccggttcgaatatgtcagactctgatatcgaaaaggccgtgaaagaggctgctgagtttgaggctcaggataagaagagaaaagaggcaattgatacaaagaatgatgccgatgcttttgtattccagacagagaaagccctggaagaagccggtgataagatagacgcgaatgataagactgctgtggaggctgacttaaatgcattaaaagagcttctggagaaaacaaatgtggaagagatgacagaggcccaggttgctgaaattaaagcaggacaggaaaaattaatgcagagcgctcagaaattatttgctaagatgtacgagcagacgcagcaggcagacggagcccaggcaggccccggaccagacgcggcaggcggagaagccggttacgatgcggatgatgtagttgacggcgactacagagaagtataatatgatatcagggtcaaaaggtcatttgaccccaacatcataatatagatacgggtaagagtgagacacagcgggatctgcgaggacctgctgtgtcgcttcaagtcagatagaagggaaacataagtatggcagataagagagattattatgaggttctgggcgtggacaagggggctgatgaggctaccataaaaagtgcgtaccggaagcttgccaaaaaatatcacccggatatgaaccctggagacgcggaagctgaaaaaaagttcaaggaagccacagaagcctatggcgttttaagtgatcctgataaaagaagacagtatgatcagtttggccatgctgcctttgatcagggagccggcggtggcggcggattcggcggttttgattttggcggcggagatatgggagatatcttcggagatatttttggagatttattcggcggcggacggagcagaaggcccaataacggtccctccaaaggggcaaatgtacgcgcttctgtgcgtattacctttgaggaggctgtatttggctgtgaaaaagaactggaattaaccctgaaggatacttgttcaaagtgcagcggcagcggcgctaagccgggaacttcccctgagacttgtccgaaatgtaacggacaggggcagattgtgtatacgcagcagtccatgttcggtatggtccgaaacgtacagacgtgtccggaatgtaatggtacgggcaaggtgattaaagagaaatgtccggactgccggggaacgggttacatcgcaaaccgcaagaagattcaggtgtctgtacctgcggggattgacaatgggcagagcattcgtatccgtgaaaaaggagaaccaggcaagaacggaggtcccagaggggatctgttagtggaggtacaggtaagtcgccatcctatcttccagcgccaggatatgaacatcttctctaccgcgcctatcacctacgcccaggcagccctgggaggggaagtgcgcatcagcacggtagacggtgatatcatgtatgatgtgaagccgggaactcaaaccgatacgaaggtgcggttaaaaggaaagggagtgccatctcttaggaataagtctgttcggggagaccactatgttacgctggtggtgcaggtgcctaccaagctcaatgaggaggcaaaagaggctctccgcaagtttgacgaagcctgcggcaataagcctgcgggaaaacctgcggaaaagaaaaagaaaggctttatggaaaaactgaaagaaagtctggaagaataaatgcaggggtacagtctgacaggctgtaccttttttctgctcggagatggaatgcggtcgtattttgtgtctgatggtgctataatagttctataggtgagcagaaggaggttttatccatggcaagagaactgaaaggcggccatatcggcctgatgacaaatgatatggaagagacggtaaaatggtacaccgagacactggggttccggaaaacaggggaatttgaagctcctgacggagctgccatctgctttatccagaatggagaggtaatatatgagctaatccagcccccggttaagcttccccgggaagcctgcagtaaggtggatcattactgttttgattcaaaagacatcgaaaaggattatgaagagtgcaaagagaaaggctgccgctttaccacagacggtattatggaggctccattctgggaaaaggggatccgattttttaagattgccggcgcgtccggagaggaattggaattctgccagattttataaaaaagatttgacttttatatctaagggaagatataattaaatgcagtatcagaactcttataagactttattgtgaagtctttaggagttctttttatggagagaatgcggaaggatataaaaaaatgagtttttcacttgtacttggccagatggtaatgatatttattcttatgatgataggctttttcttttttaagcaaaagctggtgagtgagcaggctgcaaaggatatttctgtgatggttgtaaatctgtgcagtcctgttcttctaataagcagtgtttctagggaatcctctgtcacacagcacaatgtaatcgtctttaccattgtcacggttctgtcttttgccctactgattcttctgggacatttaatatctgcccttcttttggtcccaaagccgagaaaaagtgattatatgatgatgaccatattcggcaacgtagggtttatcggtatccctgttgtgtccggacttctgggacaggatgccctgatctatgtggcaatctataatctggcttttaatattctgatctatacatacggaatctacgttatcagaaaggatatggaaggcgaacagggtgggttccgtctgaaatcctgtattaatccgggtaccatagccagcctgattaccattatcattttctggtttcatataccggttcccaatgtggcagcccagctgctgaactatgcggggcagcctgccacctttttatccctgtttgtgattggaacctccctggcgcagatgaatctgcgggaggtggtttccgatgtaaggcttttgttgtttacccttctgcgctttgtggcagtgcctattatagcggtgctgatctctaagctggtgttaaaggatgagatgatgcggggggtactggcacttatgattgccgtcccggtgggaaatcttccggcgatgctgaacaaacaattcgggaaagacgattctgttgtagcaaaaggtattgtctatactactgttctgtcagttttaacaataaccgtaacctgtatgttcctgtaagaaaggctatacatttgccctgttttatgataaaacagaaagtaggcgaaaaaagtacggataaagaaagaggtattatatgaaatggaataaattcactgtaaaaacaaccacagaggctgaagatcttgtcatctcggcgctggtagatctagggattgaaggggtggagattgaggacaagcagccgctgacggaagaggacaaacagcggatgtttgtggatatactgcctgactttccggaggatgacggggtagcgtatctgaacttttatctggaggaggatgcggacacaagctctgttctggagcgtgtgaagagagaactggaggacatgcgtgcttatacggacatcggagagggaagtattgccgcaagccaaacggaagataaagactggataaataactggaaggaatattttaaacagttttatgtggatgatattctgattataccctcctgggagacggtgaaggaagaggacaaggagaggcttatcattcacatcgatcccgggactgcttttggtacgggaatgcacgagactacgcagctgtgtatccggcagctgaaaaagtatgtgacagaagagacggagcttctggatgtggggacaggcagcggtattctgtccattgtggcactgaagctgggagccaagggtgcggtaggaacagacctggatccctgtgctgtgccggcagtagaagaaaacaaagaggcaaatgatatcccggcagacgcatttaccatgatgattgggaatcttatagacgacagggcaatccaggatgccgtaggatacgaaaaatatgacattgtcacggcaaatatcctggccgatgtgctggtgcccctgacccctgttattataaaccagatgaagcagggagggatttatattacctcgggcattattgaggacaaagaagcggttgtggtaaatgcggtgaaggaagcaggcctggaagtgctggaggtaacccgccagggagagtgggtatccgtgacagccagaaagaattaggtgggaatatgcatcgtttttttgttgagcctgagcaagtaggccgggaggagattaccatcataggaaatgatgtgaatcatatgaaaaatgtgctccgtatgaagcctggagaaattattgggatcagcgacggtaccggcattgagtatacctgtgaggtccttgcgctgaacaaagaggtaaagactaaaattcttacatgcctggatgcaagaagagaactgccgtccagaatcacgctgttccaggggcttccaaagtctgacaagatggaatggatcattcagaaagcggtagagctgggggtatatgagataattccgatgactacaagaaacacggtggtcaagctggataaaaagaaggaagagaataagcggaagagatggcaggctatagcagagagtgcggccaagcagtctaaacggttatatatcccccaggtgggagcacttatgtctttttcccaggcagtgaaaagggcctgtgatatggaggtaaggctgattccctatgagctggctgagaatatggctgagacaagagagatcattgccggaatacgtcccggccagagggtggctgtctttatcggcccggagggaggattcggggaggaagagatcgccatggccatggaggctgggattcggcctattaccctgggaaaacggatcctgcggacggaaacagcaggaatttcagtattgtctgttctgatgtttaccctggaaggagaacaggcggcagctgaaaagagcagggaatgacaggaccgtgtggtgaaacttggaggaaataaaatggaagcttatttagataattcagctacaaccagatgctatgagtgcgtcagggacgtggtggtgaagacgatgatgactgattacgggaatccttcagctatgcatgcgaagggagtagaggcagagcagtatgtcaaacaggcagcccagaggatagccagggctatgaaggtacaggaaaaagaaatatattttacttccgggggcacggagtcagataattgggccctgatcggtgcggccatggcgaatcaacggcagggaaagcacatcattaccacggctgtagagcatccggcggtatcggctcctctggcgtatctgacagagctgggattccaggtatctgtactgccggtgaacaggatggggacagtatcgctaaaggatctggaggatgcgctccgggaggataccattctggtgtctaccatgtttgtgaataacgaaataggctctctgcagcccgtggaggaaatcggaaagctgttaaaggataaggcgccgggtgtagtgtaccatgtggatgccatacaggccttcggcaaataccgcatattccccaaaaaacttgggattgatctgctggcagtgagcggacataagattcatggaccgaagggtaccggtattttatatatcaatgagaaatgcaggatacgccctctgatactgggaggggggcagcagaaaaatatgcggtccgggacagacaatgttccgggaattgccgggctgggtgctgccgctgaagaaatataccgggactttgaccgtaaaatcccaaagctgtatgaactgaagggatatttcaggggacagctggaagggattgcagatgtggtgattcacggcatggacacaaaacagggtgctccccatattgtgaacgcaagctttctgggagtccgcagtgaggtccttctccacacattggaggaaaagggaatatatgtatccgcagggtctgcctgctccacacataagcgggctgggagcccaaccttgtcggcaatgggagcgtcgaaagcggagatggaatctgcggtgcgcttcagtttctcagagtttacaaccaaggaagaactggattattgtctggaggccctcagggaagccgttcccatgcttcgcagatatgcccgtcactaataaaggagaatactatgtttaaagcatttttgattaaatacgcagagattggaatcaaaggaaaaaacagatatctttttgaggacgctctggtagcccggataaagcaggtacttaaggaagtggaagggatatttcacgtaaccaaagaacaagggcgtatctatgtctttgcagagggagcctttgactatgaggagactgtggaggctctgaagcgggtgttcggaatcttcggcatctgtccggttgtggtgctggaggataaaggctatgaggagctggcaaaagaggttgtctcttatatggaccacatgtacccggacaaggataaaagctttaaggtcaatgcaagaagggcaaagaaaagctatcccctcaactctatggagctgaactgtgaactgggaggagctgttctggacgcctttccgtctatgcgggtggatgtgcaccatccggagattatgctgaatgtggaaatccgcagtaagatatatatatattcagagattatccccggaccgggaggaatgcccattgggaccaacggtaaggcgatgctgcttctatccgggggaattgacagtccggtagcgggctatatgatcgcaaaaagaggggtaaaaattgatgctgtatactttcatgcacctccctataccagtgagcgcgccaagcagaaggtagtggaccttgcccgtctggtagccaggtacagcggccccatccagctgcatgtggtgaactttacagatattcagctctatatctatgagaagtgccctcacgatgagcttaccattataatgagacgctatatgatgaagattgcggagcattttgccagggagaacggatgcctgggactgataacaggggagagcatcggacaggtggccagtcagaccatgcagagcctggcagctaccaatgaagtctgcacgctgccggtataccgccctgtgattggatttgataaacaggaaatcgtggatgtatccctgaagattggtacgtatgagacgtctatacttccctttgaggactgctgcaccatttttgtggcaaagcacccggttacaaaaccgaatcttaatatcataaagcgctcagaaaagaatctggaggaaaagattgatacccttatggaagaggcgatccgttccacagaagtgatttccgtagaataatgtgggaatatagaacagaaaaaaacggcctctgcactgcagggccgcattctgttttgtctgttctctgattcgtatataacagagaaattaaatcatgtaaggttttaaagtctctaaaatagtatccaaaggtccttcatttgcgtggatattcaaatcgatcggcttggataaatctaagctgaaaatccccataattgatttagcgtcgattacgtatcttccggatactaaatcaaaatcaaagtcaaacttagtaatgtcgttaacaaatgattttactttatcgatagaatttaatgagatctgaacagttttcattggaatccctcccttatgtattagtactgtttacagggataatcttaccgtctatactgggaaaagtcaagatgaaaacacacaaagatgaaaagcaggattcgtcaagtcgcataataaatggaaaatgttaggaatagaaaatatggaaaaaaaagttgccctgcacaacctgggctgtaaagtaaacgcatatgaaacagaggctatggagcagatgctggaggaagcgggatatcaaatcgtgccttttgctcccggggcagatatttatattatcaacacctgtaccgtgacaaatattgccgaccgcaaatcccggcagatgcttcacaaagccaagaaaatgaatcccgatgccattgtagtggcgacggggtgttatgtacaggtaggaaaagaaaagctgaaaaaggatgatgccattgacctggtggtgggcaataataagaaaaaggatcttctgtctattctggacgcctacgtccaggggaaggcaggggacaaagaggaagtcctggacatgaaggaggcgctggagtatgaaaatcttcagctttctcagaccggggagcataccagagcctatctaaaggtacaggacggatgcaatcagttctgcagctactgtattatcccctatgccagaggcagagtcaggagcagaaaaaaggaagaggttttggctgaggtaaaccgtctgaccgcgaacgggtatcaggaatttgttttgaccggcatccacctgagttcctacgggattgactgcgatgacagtctgctgtctctgatacaggctgtacatggtatagagggcgtaaagcgtatccggctgggctccctggaaccccggattataacccaggactttgcccgggcattggcaggaatgcccaagatctgtcctcattttcacctctccctgcagagcggctgcgatgagacgctaaagcggatgaaccgccggtacagtgccggagagtaccgggaaaaatgcgagcttttgcggcaggtatttgataaccctgctctgaccacggatgtgatcgtgggatttccgggagagacagaaaaagaatttcaggagtcccgggagtttattgacggcatccggttttatgagacacatatttttaagtactccaggagagagggaacccgggcggcagctatggagaaccagattcaggaatcggtcaaaacgcagagaagcagggatttaattgaattgggagaactgcaccagagggaatatatggaatcctttttgggaaaagaagtggagatcctgtttgaggaaacagtaaatatccagggcaaagtctgctggatcggtcatacaagagaatacattcgggcagtggcaaagacagatcagaacctggagaatgtgatagccaggggaactgttcgcggtttttcgacaaaagatacgattatttgtgaaatatagtagaaaatatccattgaattctgtgtagttttatattagaataaaagaaagtttaggtaagggcgtgaaaatatggcaaacaataatattagcaatacacaatatttcaaagtaaaaacagaaccggagatccaggtaaaagagattctggatctggtatataatgcgatggacgaaaagggttacaatccggttaaccagatcgttggctacattatgtccggagatcccacttatattaccagccataaaggtgccaggagcatgattatgaaggtggaaagagatgagctggtagaagaactcctcaaggagtatatcaagaataaatcctggaaacgagattaatctatgagaattatgggacttgattacggttcgaaaaccataggggtagcagtcagtgaccccttaggtttgactgcccagggaatcgaaaccattcatcgcaaggacgagaataagcttcgcaagtctctggcgcggattgaagaattggtacgtgaatatgaagtagaaaccattgtgttaggctttcctaaaaatatgaataataccattggggacagggctgtcaaatctcttgagctaaaagatgttctggagagaaggacaggcctgcctgttgtgatgtgggatgagaggctgacgacagtggaagcgaaccggacgctgatggagagcggggttcgcagggaagaccgcggcaaatatgtggacaagattgccgctgtatttattttgcagggatatttggattcccttagctaaaacttaatattgtgaagaaaggatgtcaggtatggagactattatatttgacggggacgacgggattcagctggaattcggtatactggaacagacaagagtaaacggacataactatcttctggtagtagatccggacgaggaagacgaggaagagggaagcgaggcttatatcctgaaggatatctctgaggaagaggacgaagaggcctgctatgtattcgtagaggacgacacggagtacgacgccgtgtttaaagtttttgaaactatgttagaagatgttgaatttgtgaaataataataagtgaacaatgcactttattctacgtaaaagtgaaggtaagaggtgagaacgtgacagacagccaagagtttgcagagattttaagaaaaaacgggttgaaagtaaccaaccagagactacggatattggaagtgctggctggctgtcccgatcggcacctgacagcagaagaaatttatgatctggtaaaggcagaatttcctgagataggacttgctacggtttaccggaccatacagattttattagatttgcatttaattgatcggattaatctggatgacggatgcgtgcgttatgagatcggccaggataaggaccgggacagacaccaccaccatcatctgatttgtatatcgtgcggaaagattatctcactggaagatgactttctggaacaattagaggagcatatcagggattcccttgggtttaccgtaacggaccacgaggtgaagctttttggatattgcagagattgtacgaaagaacagaataaagtagaatgaggtgccaattatatcatatgacggaggaatcattttgaaaaaaaagaataatggcacaagcttgaaaataatacccctgggtgggctggaacagattggtttgaatatgactgcctttgaatacgaggacagcattgtggtagttgactgcggactttcttttccggaggatgatatgctgggaattgaccttgtgatcccggacgtgacttacctgaaggataatattcagaaggtaaaaggatttgtgattacccatgggcatgaggatcatatcggggcactgccctatattttaaaggaaattaacgttcctatctatgcgacaaagcttacgataggactgatagataataaattaaaagagcacaacctgctgaaaacaaccaagagaaaagtgatcaaacacggacagtccatcaatctgggggctttccgcattgaatttattaagacaaaccacagtattcaggatgcgtccgccctggctatctattcccctgcggggattgtggtacacacaggggattttaaggtggattatacacccgtgttcggggatgccattgacctgcagcggtttgccgagattggaaagaagggcgtacttgcgcttatgtgcgacagcactaatgcggaacggccgggatttaccatgtcggagcgcacggtgggacgcacctttgacaatatattctcagaacacaagaataccaggattatcattgccacatttgcatccaatgtagacagggtgcagcagattattaattctgcctataaattcggcagaaaagtggcggtggaggggcgcagcatggtaaatgttattaccacagcttctgaactgggctatctgaagattccggagaaaacactggttgaaattgatcagatgaagaattatccggatgagcagatgacgctgattaccaccggcagtcagggagaatctatggcggctctttcccgtatggcagccagtattcataaaaaagtatctataaaacccggcgatactattatattcagctcgaatcccatccccgggaacgaaaaggcagtgtctaaggtaattaacgagcttgggatgaaaggggcggatgtcattttccaggacgcccatgtatcgggacacgcctgccaggaagaaattaaactgatttactctttggttaagcccaaatatgccatacccgcccacggggaataccgacatctgaaggcacaggccaaggtggtagagcagctggggatagataaggacaatatttttattctgtcttcaggggatgttctggaggtgagtgatgacaaggcggaagtgacgggaaaagttcatacgggaagtatcctggtagacggccttggcgtaggagatgtgggaaatattgtgctcagagaccggcagcatctggctgaggatggcatcattatcgtagtccttaccctggagagaaggagcaatcagctgctggcaggcccggatattgtgtccagaggattcgtctatgtaagggaatcggaagatctgatgggagaggccagagttgttgtggaagatgccctggacgtttgtctggataaaagaatctccgattggggcagaataaaaggagtcatcaaggattcccttggtgaatttgtatggaaacgcacaaagagaagaccgatgatcctgcccattattatggaggcttagaggtgataaaatgagtttgatagaaacctgtacggaaaggctggcagcagccatccgcaccggtgatgtttataaacgctacaaaaaggcgctggatgaactgaagctgatgccggaagagaaagcaaaaatggatgaattgcgaattctgaactatcgtatgcagaatgaggaaaaggacattgatctgtacgaggccattgatcaggtggcggagcgtatggatgagctgctcgaaatccctcaggtgagagagttccttttggcggaacaggccctctgcaggcagctgcagaatataaatgcaacgattcaccagggaattgaaatcgacgtgccggatctgtaaaagtaaggagaatattatggctaatagaatgagagacgatggacatggagtggcaatcgcaggtgggtttttcagaattcttctgtacgtctgtgtgatattcgcaatcatatatgtaggtaaaactgcttacagctttggatacgatatctttaatcaggtacctgtgtcccagggagagggaaaggatgttactgtggtgataaaagacggaacatctgtgtacaagataggtaaaatcttgaagaataagggcctgattgatgatgcgaaggtttttgtggtacaggaaaagctatcaaactataaggataaactgcaggctggaacttatattctgaacacgtcccagaccgcagatgagatgatggcgattctggcccgggagaatacggaaggccagcctgaacaggaagacaaagaggaagacggtacaaaggacgaggcggacaaaactgcggacgagaatttggagaaagtaagccaggatcctcaggacggagacgatgcccagagcggtgaaggcgactccggggaagatggggctgaaggaggccaggaataagcaggatgggagattgacagatgattgtagaggagagaatggctgcctatataaattctctggacagggggaatacgccatttttggatcagcttgagatagaggctgtccagaatcgtgttccgattatccggagagagatgcaaagctttttaaaggttctgcttctgtcccttcgtcctctgaacatattggaggtagggaccgcagttggattttcagcgcttttgatgagcgaatacgccccacagggctgccggattacaaccatagaaaactatgaaaaacgaatccccatagccagggagaatttcaaaaaggcaggaaaagaagatgtgattactcttttggagggagatgcggcagacatactgaaagatcttgatgataggtacgatctgatatttatggatgctgctaagggacagtatattcacttcctccctgagatactcaggcttctgcgcactgggggagtgctgctctcggacaatgtgcttcaggatggagatatcattgaatcccattttgccgtggagaggagaaaccgcaccatttataaacggatgcgggaatacctctatacgctgaaacatcatgaacaattggaaactgccatccttcctctgggggatggcgtaactatgagcacaaaaatcaaatgagtgatgatgcaatgaaaaaaccagaattattagtgcctgccagcagtctggaggtattgaaaatagctgtgatatacggtgctgatgcggtgtatatcggaggggaagccttcggactgagggcaaaagctaaaaacttttccatggatgaaatgagagaaggcatacaatttgcccacgatcatagagtaaaggtctatgtaacagccaatatcctggctcataacgatgatttggaagggatccgcacatacttccgggaacttagggaaattagaccggatgggcttataatagccgatccaggcgtgtttatgattgccggggaagtatgtccggagatcgagcggcatatcagtacacaggcgaacaacaccaattatgagacttatctgttctggcataagctgggagcaaagcgggtggtatcggccagggaactgtctctggaggagatacgggggattcgcagccggattcctgaggaactggagattgagacctttatacacggggcaatgtgtatctcgtattccgggcggtgtctgctcagcaactacttcaccggacgggatgccaaccagggagcctgtacccatccctgccggtggaaatattccattgtggaggagacaaggccaaatgaatatatgcctgtctacgagaatgaacggggtacttatatcttcaattcaaaagacctctgtatgattgaacatatggaggatgtgcttacctgcggaatcgacagcttaaagatagagggccggatgaagacagccctctatgttgcaaccgttgccagaacctacaggaaagcaattgatgattatttttcagatccctccttgtaccgggaacatatgccctggtaccgggagcagatctctaactgtacgtaccgccagtttaccactggtttcttctacggaaagccagattccgatacccagatttatgaccagaatacgtatctgaaagagtatacgtatttgggatacgtggaagcaaaggatgaccgcgggctctgccggattacccagagaaataaattctctgtaggggaaaccattgaagtcatgaaaccggacggcagaaatatttctgtgcaggtcaaatccattctggatgaggagggcagtccccgggaaagtgctccccatccaaaagaagtgctatatcttgatctgggaatagaactggatccatacgatatcttaagacggcaggaagaatctgcgtaatttcagaagggcatttttttctattctagagacgtaagagcggctgatattcagccgctttgctatttcccgctgggtatactcttcctccccgaacaggccatagcgaagctttaccacctcatattctctgggggtcagaacagactcaatcagctcatataatttttttacatcttctttgaaggtataggtatccaccacatctaccggaacattttctataatgtccagcagatgaatttcattgccttccttatctgtgccaatgggttcatagagggagacttctttggacgtcttcttgcgggagcggagcatcatcaacagctcattgtcaatacacctggctgcataggtagaaagccggttggctttattgctgtcaaaagtttgtattgccttgatgagccctacagttcctatggaaatcaagtcatccaaatcttcatctattccctgatacttcttcacaacatgtgcaacaagacgtaagtttcgttcaataagaacatttttagcttccaagtcgcccccctggtatctctgaagataatatttctcctcttctacggtaaggggcttaagaaatgtcttcaaaaaggttacctcaaagggatttgtttatagtctatgtgagagaagaagattttgtgcttttccatctgaaaagggcgaaaaaggggacgtgttctttctggaaagaacacgtcccaaaataggatcgacctgtccccaatgaggttttagctttgtttatcctgctggtaagctaccagtacaatgtctttgtctgtcttctgactgatttcttcttccagacggttgatcatggaattatcggactctgtaatatctgccacctggtatcctgaatattctttgttatccatttgaaacacctccttttgatgtagtatgtgagaaaaagagcaaaattatgttttttttcatggtgcaattgacatggcataagttttgtgacaaaataaaagaaccttttattaaaacttctgtatttccgggacatttcgtccatgtttatcctttcaatagtaattactatattaaataataagtttaattctttttgtctctgtgttttgcagcaggcatatctttttctgttcagatttgtcaaagaaatatttccaatgcataagtgaatggtatttgagccggaggaaaggcttggagaggagttaagtatgtttagcagtgtattgtcagcagctattatgggagtagaatgttttccggtaagggtggaggcagatgtgagtgacggacttcctatgtttaatatggtggggtatcttacttcccaggtgcgggaggctcaggacagagtgaagactgctatgcgcaatatggggattgcgctgcctcccaaaagggtgacgattaatctgtcgcctggtgatctgcgaaaggatggccctgcctttgacctgcccattgctgcagctattctgactgctctggggtatctggaggaggtcatggtaaaggatgttttgattgtgggtgaattgagcctggacggtaccgtacacccggtatccggcattctggctatggtggataaagcgaaggagctgggatgcagagcctgcgtactcccaaaggaaaactggagagagggtaatattatccaggggattccagttgccggggtcagtaccttaaaagaaaccatagaaatgcttcgcagcggcgattttgagcgttttcagcgagaaaattccgtcggggaggtattttacagggaaccggaatattctcttgattttgacgaaatacagggacaggaggctgtaaaaagggcggcggtagtggctgccgcaggttttcacaatctattgatgataggtcccccgggagctggtaagacaatggtggcaagacggctccccacaattatgcctctgccgtcgctggaagaatgtatagaaatatcaagaatttacagtatcgcaggtcttctaccggcggacagtcctctgatggttacccgtcccttccgggcgccccatcatacgctttctccccaggctctggccggaggaggcagaattccccggccgggagaaattactttggctcacagggggattctctttctggatgaactgacggaattctccagagtcagcctggagatcttaaggcagcctctggaagacagacagatcttaatagcaagggcaatggggagcttctgctttcccgctaactgcatggtagttgctgccatgaacccgtgcggatgcggctattttccggatatgaaccgctgtacctgccggcctggggacattagcaaatatctgcggaagatcagcggtcccctcctggaccggatggatatctgcgtggaggcaggggcagtaaagtatcaggatattgcgtcaaaacgaaaaaaggggccttcctctgctgatcttcgtaaagagattacaagggtacataagacgcaggaggataggtttagggggacagagatacgcttcaactcacaaattcccggttcagaacttgaaaccttctgtcctgtggaaaagcaaggcagggaacttttggaaaaagcgtataaaaagatgaattttagtatcaggggctatcatagaatcttaaaaacagcccgtacgatagccgatttggagggggaagaaattcttctaaaaaggcatatcggtgaagcgatctgctaccggaaggctgataagaaatactggaacatttaatggttatacaaagagaggacgtaccaccatgttctatcaggcacagagaaaaggaacttggggtataaaaatcagaataggaggaattatggagaatacgggagacaaagaagttgtctgttatcataaacttcacagggagtaccccaggcgtctgctgcactacggtgatatgccgccccgactgtttgtaagaggagtgcttcccagagaggacagggctaccgtggctattgtaggggcgagaatgtgcagctattatggtcaggtgcaggcgtttgaatttgcaaaagcgctgagtcaggcaggggttcagattataagcggtatggcccggggaatagacggccatgcgcaccggggagcactggcgggtggaaccccgacctttgctgttcttggctgcggcgttgatgtctgctatcccaggtcaaattatgatttatataaaaaaatccctgaacagggagggctgctgtctgagttccccctgggatatgaacctctgccccggaattttcccctacgaaatcgtataatcagcgggctggcagacctagtgctggttatagaggcaaaaaagaaaagcggctctctgattaccgcagactgtgcactggagcaggggaagacggtatatgccctgccggggcgtgtgagcgatgggctaagctatgggtgcaaccgcctgatagagcagggggcgggaatcgcctgttctgtggagagcctattggaagaactgggaatttccccgggaaaaagcgacaaattgctaataaaatcacaaataagacttgaaagtcagaaaaatatggtgtatagttgtctggatttacagccccagaatctgaatcaattattagaaaaaatacctctgtctccagaggaagttatggggattcttctggaacttcagctagaggaactaatagtggaaccgatgaaaaactattatgccaaaataaaataaatgaaatggaccgaataccggaggaggtaaggaatggcaaagtatttagtgattgtggagtcgcctgcaaaggtaaaaacaatcaagaaatttcttggttcaaattatgaagtggctgcatcaaacggtcatgtgcgtgacttgcccaaaagtcagctgggaattgatgtggaacatgattttgaaccaaagtatataacgatccgaggaaagggcgagctgctggcaggactgagaaagtcatccaaaaaggctgacaaagtatacctggcaactgacccggaccgtgagggagaggcgatctcctggcatctctctaaggcgttgaaccttcaagacgacaagatgcgccggattacatttaacgagattacaaaaacagcagtaaaagcttctataaaagaggcgagagatattgatatgaatctggtggatgcccagcagaccagaaggattctggaccgtatggtaggctataacatcagtccagtcctttgggcaaaagtcaagagaggcttaagtgcaggccgtgtacagtctgtcgcccttcgcatcatcggtgacagggaagaagaaattaacgcttttataccggaggaatactggtctctggaagcttccttcaaagtcaaaggtgagaaaaagcccctggtggccaaattttacggcagtgaaaagaaaaagatggagatccattcccaggaggagctggataagatcttaaaggctctggaaggggcaaaataccaggtggccgaagtgaaaaagggagagcgcaccaagaaagcacctctgccgtttaccaccagtactcttcagcaggaggcttcaaaggcgctcaatttttctactcagaaaacgatgcggctggcccagcagctatacgagggaattgatataaaaggtaacggcaccgtaggtattattacttatctgcgtacagattcgacccgtatctctgaggaggccgatcagctggcaagagagtatatcacagagcagtatggggaaacgtatgcagccaacaaggaagagaacagcaataagggaaaaaagattcaggatgcccacgaggcaatccgccccacagatattaccagaacgccagctgctatgaaagagtctctgtccagggatcaattccggctgtatcagttaatctggaaacggtttactgccagcagaatgcagccggccaaatacgagacaacgtctgtaaaaataaaagggggagactactactttacagtagccgcctcaaaacttaaatttgacggttttatggcagtctatgtgcagagcgatgaggagaagccggaaaataatctgatgatgaaaagtctggatgagaacacggagctttctcttgagaactttgacggacagcagcattttacgcagccccctgcccattatacggaggcttctctggttaagacactggaggaacttggaatcgggcgtcccagtacttatgcccccacgataaccacaattatagcccgccgctatgtggcaaaagagaataaaaatctttatattacagaactgggagaagtagtgaataatatcatgaaacaggctttccccagcattgtggatgtgaattttaccgctacttttgaagaactcctggataaagtggaagacggcagtgtatactggaaaaccgtaatccgcaatttttatcctgatttggacgaggcagtaaaggcagcggaacaggaattagaacaggtaaaaatagaagacgaggtgacggatgttatctgtgaagaatgcggccgcaacatggtaattaagtacggtcctcacggaagattcctggcgtgtccgggttttcccgactgccggaatacaaaaccgtacctggagaagattggagtatcctgccccaagtgcgggaaggatattgttctcaaaaagacgaaaaaaggtcgtaagtattatggctgtgaagataacccggagtgcgattttatgtcctggcagaagccgtccaaagagaaatgtcccaactgtgggggctatatgctggaaaaaggaaacaaacttttgtgtgcagatgagcactgcggctatgtaacggagaagccaaaagaggaaaaggaatagatggctaagctgctgtaatgggtttaaaataccatacagcagctgatttttggataaaattccttttttgatttgcatgattatccataaattttgtgttattggcttcaccagcttttgaaactgaggaattatcagaaaaaaagttaaaaaagtataaatccgttagcgacgacattgatttgctgccaattgtatgatagaataaagcaaatgggagaattttattttattactcatatttaggacaaaagaaaggaggttcagcatgagcgtacaactattggataagacgagaaagataaacaaattgctgcacaacaataattcctcaaaggttttatttaacgacatctgtgaagttatggtagaaacactggagtcgaatattctggtactcagtaaaaaaggtaaggtgctgggcgtaggactgtgcgaaggagtagaagagattacagagctgattgaagacgaggtgggaggctttatcgatactctcctgaatgagagatttctgggagtgctttctacgaaagaaaatgtaaatcttcagactctgggatttgagggggagcatgtaaaacaatacatggctatcattaacccaattgacattgccggggaacgcttggggactgtttttatgtacagaagcggtaagcagtacgatattgaagatataattgtgagtgaatacagcaccactgtggtaggacttgagatgatgcgttccgtacatgaagagaatgctgaggaaaatcgtaagatacaggttgtcaaatctgctttcagcacgttgtcattctcagaactagaagctattattcatatttttgatgagctggacggagatgagggaattctggttgccagcaagattgcggacagggtaggcatcacacggtctgtaattgtaaatgcgctcaggaagtttgagagcgcgggcgttatcgaatccagatcctcaggaatgaagggaacctatatcaaggtgctcaacgaagttatattcgatgagctggaagaaattaaaaaacggaaaatagttaaaaaataatgcttgttttgaactataaaaggagctgttaggtatctgcagttccttttttatgttattttgctgctgcctttgccgcggaaaataaaaaatgtttaatttcttcttaaatggcataggataaagatggaattataaaataaatataaaatcaggtaaaaattaagaaagtgagaaaataagagaaaacaagagataaaaagagataacaagagaatggatgctatagaatctctttcagaaacttgcagattttttcaagattaactaatatatgactaacggttagcactcgatgtaaatgagtgctaataaaagcagaaaatattttaaggaggcaatagattatgaaattagtaccattgggagacagagtcgttttaaaacagttagaagctgaagaaaagacaaaatcaggaatcgtattaccgggtcaggcacaggaaaaaccccagcaggctgaggttgttgcagtaggaccgggcggagttgttgacggcaaagaagtaaagatggaagttaaagtgggagatcaggtaatctattccaaatacgccggtacagaagtaaaattagatgatgaagaatttatcattgtaaaacagaacgatatcttagcagtagtagaataaatcatagaattcaggaggaatgacagatatggcaaaagagattaaatacggagcagaagcaagagaggcactgcagaatggtgccgataaattagcgaatacagtacgcgtgacattaggaccaaaaggaagaaacgtagttctggacaaatcctttggcgcacctcttatcaccaacgatggtgtcaccattgcaaaggaaattgagctggaagacggatttgaaaacatgggcgctcagctaatcaaggaagtagcttccaagacaaatgatgtggctggtgatggtactacaacagctactgtacttgctcaggccatgattcatgaaggaatcaagaaccttgcagctggtgcaaatccaattatcctgagaaagggtatgaaaaaagcaacagatgtggcagtagaggcaattgcttccatgagcagaaaagtagaaggaaaagatcagatcgcaagagttgcagcaatttctgccggcgatgatgaagtgggagaattagttgcagacgctatggaaaaagtatccggcgacggtgttataaccattgaagagtctaagacaatgaagacagagctggatttagtagagggtatgcagtttgaccgcggatacatttccgcttacatggcaactgacatggacaaaatggtagctaatctggatgatccatatatcttaatcactgataagaagatctctaacattcaggaactgcttcctctgttagagcagattgtaaaaacaggcgccaaactgttaattattgctgaagacgtagagggcgaagctcttactacactcattgtaaataaattaagaggaacctttaatgttgcagctgttaaggctccgggctacggtgacagaagaaaggccatgttagaagatattgctatcttaacaggcggtcaggtaatctccgatgaattgggtctggacttaaaagaagttaccatggatcagctgggacgtgcaaaatctgttaaggttgagaaggaaaatacagttattgttgacggtgcaggcgataaagcagccattgatgctagaatcagccagattaagggacagattacagagacaacatccgagtttgacaaagaaaaattacaggaaagacttgctaaactggcaggcggcgtagctgttatccgtgttggtgccgctactgaaactgagatgaaagaggctaagcttcgtatggaagatgctcttgcagcaacacgtgcagcagcagaggaaggtgtaatcgcaggaggcggatccgcttacatccatgcttccaagaaggttgaagagctggcagagacattaagcggcgatgagaagacaggtgcggtagttgtattaaaagctctggaatctcctctgtaccacattgcagccaatgctggtctggaaggctctgtcattgtcaataaagtaaaagaatctgagacaggcgttggatttaatgctctgaaagaagagtatgtagatatgattaaagaaggaattctggatcctgcaaaagtaacaagaagtgcattgcagaatgctaccagtgtggcatcaacgctgttaacaacagaatctgttgtatctaatattaaggaagatactccggtagctccagcagctcctggaatgatgtaagcttcacagaattttaagactttctaagggctggcgtcgtagacgtcagccctgctttgtgctagaatgaagacagtttctaagaatgtacaaggagagaaaccatgagtgatttgtattcagaatttttggtaaaaaagcagagtaccggcaaagatatggcagtcaaaattggaatgctggccctcaccgttgtagcggtatttgcaggagtcatgatacaccctcttttatttattgcggctattgggctgggagctgcggattactttgtattccttaatctggatctggaatatgagtatctttatgtgaatggcgaacttgatatcgacagaatcgcagcaaagaccaagagaaagaaagtgaaaagcctggatacgggtaagatggagatcctggcgccggtaaagtcccatagaatggattattataataataacagcagattaaaagtactggattattcgtcgcaggatccatcccacaaaatttacgccatgattattcccgatggtcaggaattgtgtaaggttttgttggaattcgacgaaaagatgctcagcaacatacaaaaatcaaatcccagaaaagtttttacggattgacacctttgtcgaattttgttacactagggaacaaaaccaaaataaatagaaacgaaagggagagagtaaatgggtacaataattggtgaaggcattacttttgacgacgtacttctagttccggcatactcaaaggtaactccgaatcaggtagatttaagcacttatctgaccaaaaaagttaaattaaacattcctatgatgagcgcaggaatggatactgtaacagaacatcgcatggcaattgctatggcaagacagggcggtataggaattattcataagaacatgtctgtggagcagcaggcagaggaagtagacaaggtaaaacgttctgaaaacggtgttattacagacccatttttcttatcaccagagcatacattggaagatgccaacaacttaatggccaaattccgtatctccggtgttcctatcacagagggaagaaaactggtaggtattattaccaaccgtgatcttaagttcgaagaggacttttctaaaaaaatcaaggaatctatgacatctgaaggcctgataacagcaaaagagggaatcacactggaggaggcgaagcgaatcctggcaaaagccagaaaggagaagcttcctattgtagatgatgatttcaatctgaaagggcttataaccatcaaagatattgaaaaacagattaaatatccgctgtctgcaaaggacgcccagggaagactgctgtgcggagctgctgtgggaattactaagaatgtgatggagcgggtggacgcccttgtgaaggtgcgggtagatgtcattgtcatagattctgctcatggccattcggagaatatactatccacacttcgcatgattaaagacgcatatcctgagcttcaggttatcgcgggaaacgtagccacagcggaggcaaccagagacctgatagcagcaggtgcggatgctgtaaaggtaggaatcggtccgggatctatctgtaccacaagagtggtggcagggattggtgttcctcagattacagcagttatggactgttatggagaggcaaagaagaccggaactccggtaatcgctgacggaggaatcaagtactccggagatatgactaaagccattgcagcaggggctaatgtgtgcatgatgggaagtatctttgccgggtgtgatgaaagtccaggtacctttgaattataccagggcagaaagtataaagtttatcgagggatgggctccataggagccatggaaaatggaagcaaagatcgctatttccagacagacgcgaagaaactggtaccggaaggtgtggaaggccgtgtggcatacaagggacatgtggaagacacggtattccagctgattggaggaattcgttctggtatgggctactgcggtgcaccggacattgaaactttaaaggaaacaggaaaattcattaagatttccgccgcttcactgaaagaatctcatccgcatgatattcatataacaaaagaagcaccgaactacagtgtagacgagtaaaataagaggaggaggcaaaggggtgcctcctccctctttttggcagaggataagcatatggtaaggggtaaaagacgaaggaaaagacgccgcagtgccgggtatcggaagaggcagctggaggtaagacgtaatataatactatttggaattgttctattgggagtgattctgctctgtcttacaataaagacagtaaagaataaaagagaggaagccaggacggctgctatggatgacaaaaaggtatcttttgtgggagcaccgcctctggacgtgcagctgctggatgtgaatccgtattcaaggccagggacggcgctggagcggattaaggggattgtaatacactatacagccaatccagggacctctgcgcagaataacagagactactttgaagggctgaaagacagccaggagacaaaagccagcagtcattttgtcattggcctggacggagaagtggtgcagtgcatacccagcaatgagatatcctatgcgtccaatgagcgcaacagcgataccctctctatagagtgctgtcatccggacgagagcggccatttcaatgacgccacctatcagtcactggtggaactcacgggatggctctgtgaacggttttctctgaagtcagacgatgtcatccgacattatgatgttaccgggaagatatgtcccaagtattatgttgagcacgaagacgcatggaagcaattcaagaaagatgtggacaagcagataaagatagtagaaaaagagcagaaagaagcaggggaataggaggcagaaaatgaatctattcaaacattcgctcaccattcaaaaacctcagactatggtgaagattacgggtcagataagggaagacattaaaaacagcggcatccgatcagggatagttgcagtgtactgtcctcatacaaccgcaggaataaccataaatgaaaatgcagatccggatgtagtaacagatgtgatctatggctatgaaaaagtatttcccacaaatgacagggtttaccgccactgcgaggggaattctcatgcccatatgaaatcctctgcaatgggggcgtcagccaccttgattctcgaagaaggaaaaataattctggggatctggcaggatgtttacttttgtgaattcgacggacccaggaatcggaactattatgtgaagattatagaagggtaagcaattggggacaggtcatgttgaatttgggacacccaggatctatttggggacgtgttctttgtagaaagaacacgtcccccttttttactttttattccagattcagcctcttggacaatatatagtggattccaaaataaaatcctacagtgagcagtaagtcgaatattatagaaaatcccatatacactggtgacatcccaacggtggatgtggttgttattaatgcattgtttgaattgacggagtaaggactccatcccagagtgagcatcatgatgactcctacaatctgcagtaccagatagattcctgccagggaaccgatggctcccaggatcttatgggtcttgcagagacttcccagacaaatggcaaagtataccataaaaatgctaaagaaaacactgatgagcatggttaatagcatatagatggtactaaagaactcagaggttccaaaggctgtcagcattgctttccagaattcctggaagaattcaggcaggtattgcatggtataagagttgataaaaatgattgccagagaggcgcatatgattatcatgtcaatcaacccccagatgataaatacaaagcagcgggaccatatatgctgggcgggggttactggcagcgtgtgcattaggtagccttcattggaaaacatgcctttctggaagtccctggccagaaatatataagtcataactgcgatacagaagattcccagtacatacagcagaatatagactgcagtcacaagactagtggctggggatgcggtattgaagttgccttccccgtttaatgccattgagaaaataattcttcctattacagagaatgcaagcagtgccccatgaattagtatcagcagcttggatacctgttttaaattatgtttaaacaattttcctaacatctgaatacctcccggaataaaccatctacagatttgcccctctcataccggatttcgtctacagaggaaattagcttaatctgaccgtactgaataaatatgacatcgtccagtacgttctctacatctgaaatcaaatgggtggagatgatgatggtggcatcttctgcatagttattaataattgtagaaaggatgtaatctctggcagcaggatctacgcccgcgataggttcatccaggcagtagagcttagccctgcggctcatgaccaggatgagctgtactttttctttggtgcctttggacatagttctgaggcgatcgctgggattaatattcagcttctccagcatatcataggcgcggctccgatcaaagtcttcataaaaatccacaaaaaagctgatggcatcattcacactcatccagtctccaagatatgtgcgttccggaaggtaggaaacaattttttttgtatctacacccggggccataccatcgattaggacttccccgttggtggggactaaaagaccgttaatcagcttaatcagcgtggtctttccgcttccgtttgggccaagcagcccgatgatttttcctttatccaaggataggttaatattggcaagtgctgtcttagtaccataagacttggtaagattcttgcactctaatatctggctcattctttctcctccttgtcaattttctccagctgcgtaatcagatcaataatctcctgctttttaaatcccagctgcgccatcttatccagaaattctttgatatgagctgacgcaatttcttctttcattttttgaatcataataatgtcctccgtgatatatcgtccgctggttctctgggcaaataccagaccggttctctcaagttctgtcaaagctttctgcatggtattaggattgacggcagcttctgatgccaaatccctcactgacgggagcctgtctcccggagcataattcccggatataatatcttgttgtatcttttcgataatctgagcatatatcgggcgttcggaactaagattccaagccattaatgaacacctcctgtactattgtattaatgatttaatacaatcataatcgattttttctttcttgtcaaggataatgacaaagaaaatggtttatagtatactgaaagaagaaaattaacggaggaatcatcatggcagaaagcaagaatgtatggaagagagaggaagtaaaggaagaagaccgttgggccatagaagatttatatccctgcagggaagcttgggaaaaggatgcagagatactcagacataagatagataagctggagcagtatcagggaacacttggagagagcagccgtgttctttccggtatgctggaagaatacagcagtacgagccaactctttgaaaggctgtatgtatacgccaatcagaggcttcatgagaatactgccgacagtaccagccagaagctcaccggggaagcccaggttcttatgaccctgctgaacagtaaaaccgcatatattgtaccggagatattaaacataccccaggagaagctgaatatatttatagaggaggatgagggactgaaaccgttcagaatcttcctgactcaaatcatccgtcagaaggagcatacgctcacaaaagagatggaagaactcatggctaaaatagacgagcttgcccagggcccgggaaatattttcagtatgtttaataatgcggacattacctttcccccaattaccaatgaggaaggaaatgaagttcccctgactcacggccgctatgccggatacctggagagcagcagccggcaggtgcgcagggatgcgttcatgagcttgtatcatacctacaggcagtttgaaaacacactggctgccacgtttgattccaatgtacggcatgcagtattcgaagcaagagaaagaaagtatgggtcatctctggaagccgctctggacggcagcaaaattcccacggaagtgtatgataatctcattcagacggtgcacggccatatggatttgatgtaccggtatctaaagctgcggaagagggcgttgggagtggaagagcttcatatgtatgacgtatatgtatctctggtagatgatgtagatatgaagataccctttgacaaagcaaaagagatagttctggatggtctggcccctctgggggaggaatatgccggccggctgagagagggctttgagaaccgttggatcgatgtatatgagaatcagggaaaaagaacaggtgcgtattcctggggggcttatggggtgcatccttatgtgctgctgaattatcaggagaatttgaaccaggtatttacccttgcccatgagatggggcacgccctgcattccagctattcggatgagaagcagccatatctctatgccggttacaaaatatttgtagcggaagtggcctctacctgcaacgaagcgctgctcatacaccatttgttggaacaaacaagtgataaaaaggaaaaagcatatctcatcaattatttcctgaatcagtttaaaggcaccctgtaccgtcagacaatgtttgccgagtttgagaagaaggcgcataaagaagtagaaaatgggggtaccctgaatgccgcatggctgaatgaaacctactataatctgaacagagagtatttcggagatggggtagtgctggatgaggagattgccctggagtgggccagaattccccatttttatactcccttctacgtttaccagtatgccaccgggttttctgcagccatcgctatcagcagcaagattctgaaaaaggagccgggaatcgttgagaaatataaagaatttctgagtggaggcagttctatggactgtatagaccttttgaaattatgcggggtggatatgacaaaaccggagccggtgaaggacgcactgaaggtattccgggaatatttggaggaattagagcagctgctatagataaaaacagagtttgagcatattgcatagaaacattaataaaataataataaatttggcattgcatttgaggaaaagtatgttacaatattgttacagaatgattaaaaaggtgagagtatgaacttgtatgaggcaatattcgtcaggaaatccatccggaattacgagatggaacccatcagtcctcagcttttaaaggaaatatgcgactatcataaagaaatagaggggctgaacgcgggaatccagacagaaattacagtaatagataataccaagaagcatcagatatcactgaatccttttggggtaaaagcaccttattatatggcgatttatacggaagaaaaggataaagcgctgatgaacgcaggctatattatggagcagatgagtctgtttatctgctctaagggactaggcagctgttttgtgggcagcgcgaagcccaagcctggtatgggaaaactgggtgacaagaaatttgtcattatgctggcatttggcaaatgcaaaggcagcccctaccggaaggcggcagaggccaagcgtatggatctgaaggagctcagcgtttacaaagaagtgccccgtcagtggatgaaccagcttctggaaggtgcacgccttgctccctcaagcatgaatagtcagccctggcggtttgtggtctatgacagcaggattcacatctttgcaaaaaagcataatatgaaccatctgggaaaatgggaagaatttaattttggtgtcatgttttctcacctgatgctggttgcggaagaactgtggctggaggtggaccttatccgcctggaggatatcagccataaaaactttcccaataaccagtatatgttaagcgctattttaaagccataaaagcccttgagaacgaaaagttcttacgggctttttgcgtgctataaaactgtagatttggcttttttaaaatcctcacgggcattttggagtagttctgggttttccagaagctctgcagcggcggacgatatgatacgtgaggcagtgagcattcctttgtgtgcaatggaagccttgccctgggcagttacggtccagtggtgcaggggagacccgttggcataacagttaaccataaagcttccgctggggacttcccagcttacatttcctgcatcagtagagatgccgctctttcggtccagagtcaaatccggatagggatctatggaaagcttggcatggggaagacttccttccagctgaaaagctctggcatagcggatttcctcctcggtatagcagatcggcgtgctggctttcaggtgctttatcagaagctgatccagtgtggagttcgggagaaagctgcggtatacagcgttttgtttgatggttacctgcgtaccggtcatcagcgcagcaccctgtgcaatattgtctactctatctttcagctctccggtgtctctgtcccttggtgcgcggatcgcataaaaaacctgtgcttcggcagggataatattgggtgcggttcctccggtgtttagataggcgtagtgaactctggcatctggtatcatatgctccctgaggtaattaacgccgatgttcataagttcacaggcatctagtgcactacgcccaagatgaggcgccagcgaagcgtgggcacttttgccgtgaaaggtgtaggtcacccgtacattggcaagagaattgttaaaaagtccgcttttataatggggatgccaggacagcataatgtctgcctcatcaaaaaaatgctcttcaatcatgagggccttgcctgctccattttcttccccgggacagccataataaaccacagaaccgcatattccggtatcctctatataatgcctgacggccaaagcggcagccattcccgctgtccccagaagattatgcccgcatccgtggccgctgccctgaggaatcaggggctgctgaacgggacagtctgccttctggctaagcccgggaagcgcgtcatattctcccagtatcccgataacaggcccggaggtgccgtatcttgcgcgaaaggcggtgggaagagaactgctggggaagcaaacctcaaatccaaggcgtttcataacgtcggcctgaagtttgctggatttgtgttcttcgaatctggtttctgcgtactcccatatggtattgcttgtatgtataaaaagatctttggactgctccagatagaatgctattcttgtcatatccatgatagtacctccaagattatctgtttttctcattataataaacaagtaaaatatttactatagggacaggaaaaaaatcgaaaaaaatcattgacaattctttctagttatagtatattaactattgtcgttgatgacatgcgcgagtggctcagttggtggagcgcgaccttgccaaggtcgaggccgcgggttcgagtcccgtctcgcgctttttttattttcggaattttgcagagtgcaaagttccttttttatttttacctctgcaaaggaagctggaagcattacacaagggagtctataccagtacagagactgtgcttgcgtaattctgtttttttacgtatactggacatatggaaattgaagattacaggaggtaccaaagatggtaagaaaagcgacaatcgccacaaaagagaatgcaaggggaggagatggaagtgttacctttcatcacattgtatcggaggatgaactgctgggacacgggaagctgctggcaaaagtagttatccatccccacagctctatcggaatgcatcagcatataggagaaaccgaaccctattacatacttagcggaaaaggtatttttacagacaatgacggcagcagaacagaggtggttccgggggatgtctgtgtgatcgaagtgggacagagccacagcctggaaaaccccaatgatgagcctttagaaatcatcgctatggtatactatgacaagacaaaataggacataaaacccccaaattctacttgagaaattccatcattaatgatacactacaggtatgattaaagtttaacaataatttatgtgaaggtggaggaatttttaatgaaaaaactaacggtgaaaaaagggtcaacctgtatggcatgtctggagtgtgtgagagcctgctccaatgcgttctacaaagagtttgatcccggcaaatcctgcatcgaaatcgtagagaagaaaggtgcaccgaagcctatggtatgtccacagtgcggcaaatgcgctgaagtctgcgaagcaggagctatcacacagaatgcgaaaggggtatatacagtgaataaaaaactctgtacaggctgcggcaaatgtgcggaagtctgtccattcggcgtgatggtaaaagcagaggattcacctgcagcatccaaatgtattgcctgcggtatctgtgcaaaggcttgtcctatggatgttctggaagtagtagagaaataaatgcggcatattacaagagcttctttccctgtggagagaggctctttttaggaaaaggaaaaagtgccggccattccacggttgacagtgcttccggtgtccattataataaagttgtataaaaggaaaacggataaatgtatacttatataagttcgtaattggacggacgtttctaccaactaccgtaatagttgactataagttcccgtgtgagagcgggaacttttgtgcgttttggaaggaggaagaaacatgcaggagttattgattttgcggggcaacatttgttacagcacgggaaaaaagcagctggagacggcagacagggggtatctggtaagcaggcagggaaccatagagggggtatattccagtctacccgccgaatacgaggatgcagagatcacagactgtggaaactgtctgattatccccggccttacggacctccatgttcacgcgccccagtatgccttccggggtctggggatggatctggagcttttggattggctgaacacacacacctttccggaggaggccaaataccgggatctggaatatgccaggaaggcttatgaaatgtttgtccgggatctgaagaatggggccaccaccagagcggtggtattcggaaccatacatgaagaggcgacggagctgcttatggatcttttggaggagtccgggcttatcaccatggtgggaaaggtaaatatggaccggaattcaccggatgagctccgggagaaaagtgccggagaatccctgcagagcacgaggcagtggcttgaaaagatcagggataaatacgagagaacacgtcctatacttaccccccggttcattcccagctgtacagatgagctgatgagcggactgaaggagattcaaagggaatacggccttcccgtacagtctcatttatcggagaatcagggagaagtggaatgggtcagagagctctgtccgtggtcagacttctatggagatgcctacgatcattttgggctgttcggaggggaatatcctgcggtaatggcccactgtgtacattccggagaggaagagatacggcggatgaaacagcgtggtgtctacattgcacactgtccccagtctaatacaaacctgtcttccggtgtggcgccggtaagaacctatctggagcgggatatgaatgttgggctgggaagcgatgtggcaggtggatttgctacctctattctgagggcaatggcagatgccatacagacttcaaagcttcgctggaggctttctgacagttccttaaagccgctttcttttgaggaagcattttacctggggacgaagggggggggatccttcttcggaaaagtggggagctttgagcccggctatgagatggatgcagtggttttggatgattcccaatgtccttatccccaggaactgacagttaaagagagaatggaacgcctgatatacctggcagatgacagccagatagcaggcaaatatgtggcagggaaaaagataaaataattgtggtctcctttggctgtgtgcaaaggggctgcaggaatcgatggagggagcacatatgctggagaggcagattagagttgcaaaaggattggaagacgccgatttggtgctgaaacatggaaagattgtaaatgtgtttacagaggatattcaggaaggggatgtagctgtctgtgaaggaatgatcgttggaatcggctcgtacagaggccgcaaggaggtagactgcaccggtaaatatattgcccccggctttatggacggacacatccatctggaaagctctatgatgcagcctgcagaattcgccagaacggtacttccccacggcacaacagcagtttttacagacccacatgagattgccaatgtatgcggcacacaggggatcgattatatgatgagggccacagaagggcttcccctggaggtatattttgtccttccctcctgtgtgccggccgctttgctggatgaaagcggtgcctgccttgaggcggaggagctgaaaccctactaccagtcaaagagggtggtgggcctggcagaagtcatgaactatgtcggcactgtcgccggggatatgaatgtgttaaaaaagattcaggaggctgtttcccagggaaaggtagttgacgggcatgcgcctgggctgggaggcaaagaactctgtgcatatctcacggcgggagtaatgtctgaccacgaatgtgcaaccgcagaggagggactggagagaatccgtcagggacagtggatgatgattcgggaggggacggccgcaaagaatctggaggctcttatgcccctctttgaacgcccttactgtgagcacgccatgctggttacagatgacaaacatccgggagatttggaaaaactgggccacattgactatatcatacgcaaagcggtctctctcggggcagatccgtgcatagcggtaaagatggcaacttataatacggcccgctattttggcctgaagcatctgggggcggtagcgccttcttatcaggcagatctggtggtgctcagtgacctgaaacaggttcaggtggaacaagtgtataaaaaagggcttctggccgctgaccggcataacggctgcgctgttcaggaacctgtggtgaacagtaagctgaaggaaagtgttacccacaccttccgtatgaagcggtttaccgtggaggacttttatctcccggtatcccgggaccggcagccggagaagatgcgcgtgatagaactgcacccgggtcagattctcacaggtgagtatatcacagagtattcttctgccagcaacggcattgatgtgcagcaggatatcatcaaactggctgttatggaacgccacctctgtaccgggcatataggactgggctatgtaaagaattacggcctgaaaaaaggggctattgcatcctctgtggcacatgactcccacaacctgattgtggcaggagccagtgagcaggatatgtacaccgcggcagaggcggtaagaaagatgcagggaggatgggcaattgccctggacggaaaggttttggaggtacttcccctgccgattgccggtattatgagtgaccggccgctcagagaggtagaggggcagatcctgaaaatgaaacagatagccagagagctgggtgtaccggagggaattgatccatttatgacactggcctttatcagtctgccggttatcccccgtctgaagctgactaccttcggacttgtggatacggattcccaggaaattgtggacgcagtcttttaaaaaggacccggagcgcttctccgggtcctttctatgtgttttattacgtcactaggttgtttttgtattggaaacagaactataaagtgctgacaattctcagcaggaagagaatgccgattacatacataatgggatggatatcttttgctttttttgtaaaaagcttaactataatccaggtcagaataccgaacataatgccattggcaatggaataggtcaaaggcatcatcagaaatgccaggtagccccccagcgcatctgccatatctacagagaagtccatcttaagtacagcggaagccatattcagtcctacgataataagggccggagctgtggcaaaggacgggatggcaaggaaaataggtgacaggaacagcgctaccaggaagagaattccggtggtcagtgctgtaaggcctgtcttgcctccctctgcaacaccggcgctggattctacgaagcttgtgatggtagaggtacccagcactgcgcctgcggtggtaccgatggcatctgccataagaacacggcccacacggggtaacttgccgtctttgtccagtagattgccctgatcggcaataccgataacggtacctactgtgtcaaataaatctacaaataagaaagagaaaacaatgacaataaattcaaatatatgtccgcctacccagctgaaatcaaattggaaaaaggtaggggcaatggacggaggaataaagctggaggctgacagggaaggaatcagagagtaaactccgttttccggatccactgcataccagccgattccctgtgcgatcatacccagaacccaggttccaaggattccccagaggatagatccctttaccttgtaatggttcattaccgcaatggcaatcacgccgatgacacataaggttacaccgggggaagcaaagcttcccaggcctaccagtgtggaatcattgctgatagtcaccccggcaccctgaaggccaataaaggcaatgaagagcccgatgcctgctgtgatcccaagtttcaggtttttaggaatagaattcacaatggtttctctgaatttgaagaaggataacaggataaagataataccttctacaaagacagcggccagagctattttccagggatcctgaatgtcctttaagtcaacgagacaaacgctgaaggcaaagtaggcattcagtcccatgcctgcggataaggcgatgggatagtttgcccagaatgccatgatgaaggtggccagggcggaggccagagcggttgccgtaaatactgcgccgctgtccatccctgaagcacttagcagatcaggattgacagccaggatgtaggccatcgtcaggaatgtcgtaattccggccatgatttcggttctgacatccgtattgtgttctttgagtttaaataatttctccatacaatatctccttttccccttgaatttagtgacaataaaacacatttgtactatactgtaatcataccgtcgtgtcaattgtttgtcaatcgtttcggaaatattgggcaaaatgtataatcaataaataaaaaaggtgaggaagtggtaataatgatagaaaataaacttatgataccatcgaattacgaccaattagatctggatgtaaggtctgtagagccagagggggagatacgcggcattgttcagatctcccatggaatgtcggaatataaagagcggtatctcccgctgatgagatatctggcttcccatggctacgcctgtgtaattcatgatcacagagggcatggcaaaagtattcgcagccaggaggacctgggttatttctatggagggggatccggtgccctggtggaggatctctttcaggtgacctgtctggcgaaggagcagtggcccggtgtgccggtgattcttgtggggcacagtatgggatccctgatagccagaaactatataaagaaatatgatgaccagttacagacgctgatcttaacgggctcccccagcaagaatccggcggtaaagctggggattcttatcgcttggacagagggaaagctttttgggcgcagacacagaagcaaactgctggaggctctttcctttggaagctatatggccaggtttcccggtgaaaaaagccgttttgggtggacatgctcagaccctgaggttgtggaggaatatgacaggtccaggctctgcggattcacgttttcctgcgatgcatatctggggctgctgaaactgatggaggagacgtacaatcagaagaactggaaatgctataatccgcagcttcccatcctttttctgggagggacagaggatccctgcatcggaagcggcaggaaattttatcatgctatccgctgtctgtacagcgttggctaccataacatcacccaaaaacgttatccgggtatgcggcacgaaatattaaacgagaaagggaaagaaaaggtctatcaaaatatcctgacgttcatagaaaagaacagggaagtatgctatacttttaaccgtgcgcaaaagggaaaaaccgatgtataaaggaaactaatccatgagagaactgattcgatatctaaaagattataaaaaagagagtattttgggccccctgtttaagatgctggaggcctgctttgagctgattgtgccccttgttatggctgctatcattgatacgggtatcagaaaccatgacaggccctatatctggcacatggggcttcttcttgtattctttggtggcctgggactggtctgttccctgactgcccaatattttgcggcaaaagcagctatgggattcggcacagcgctgagaagggacttattcgcacatataaacaatatgtcatacactgaactggatatcctgggaaccccgaccctggtaacccggatgaccagtgacatcaaccagacccaggcaggggtgaatctggtgctccggctgtttctgaggtccccctttattgttgtgggggcagtacttatggcattcactataagtgtaaagatgacggtgatatttttgattgctgtgcccgtaatttctctgattatctattttatagtaaaaagtacgatccccatctacaagagtgcccaggcggcactggacagagtttccctgcttaccagagaaaaccatataggatccagagtcgtgcgtgcattttcgaaacagcaggaagaaatcagccgttttgaggaaaccacaggagcgcttaccaggatacagctgcatgcgggaagaatctccgcgctgctcaacccagccacctatgtagtggtgaatctggcaataatggcaattctctggtccggaggctatgtggtagacagcggggagattacccagggcgagctgattgcccttataaactacatgtctcagattcttctggcactgattgccctggccaatctgattatcacatttacaaaagcaacagcgtcagccatacggatcaatgaagtctttcatacgcagccgtctatgcatgagggagaaaagacaggaagcgggggagagggggaggtgccggccgtggaattcagacaggtatccttttcatatgcaaatgccaaggagaatgcactggaggagatatctttttcggccgctcagggtgagaccatcggaattatcggaggaaccggagctggcaaatcaacattggttcatctgattcccaggttttatgatacctccaaaggagaggtgctttttagaggccggcccatacaggaataccgattggagtatatacgcagccggattggcatagtgcctcagaaggcagtactttttcaggggacactacgtgacaacatgaaatggggaaaagaagaggcctcagacagtgaaatccgtgaatccctggacattgcccaggcaacagcttttgtggaagggaaaaaagagggactggaccttaagattcaccaggggggcaggaatctttcgggcggccagcgccagcgcttgacgatagccagagcccttgtggggaagccagatatcctgattctggatgacagtgcctcagctcttgactttgctacggacgcggcgctgagaaaagccataaaagagaagacaaaaggaatgaccgtttttattgtatcccaaagggcttcctctatcaagcatgcggataagatactggtattggatgacggcagaatggcaggtatgggaacccaccgggagcttttggagaactgccgggtatacgaagaaatctgtacctcccagttatccagagaggaggtgcagaggagatgaaacagaaagatacactgaaaagagtactggattttatacggccttacaggggatacgtagctgtgatacttgtattttcccttataagtgtgacattcaccctgtatgcgcctatcttaatcggagaaggggtagaccttattctgggaaaaggtcaggttctctttgacggagtactgaaaattattgcaaaactggggataatagtagctgttacggcagtggcccagtggtttatgaatctggccacaaaccatgttaccttttgtgtggtgcgggacatccgcagaaaggcatttgcacacctggaagaggtcccggttaaatatattgacagcaatcagcccggggagattatgagccggattgtgacagatgtggatcagttttcagacgggcttctcatgggatttacccagctgtttaccggggtagtcacaattgtgggtacactgggatttatgctctccattcatgtcaaaattacacttattgtagtcctgatcacccctgtgtctctttttgttgccagctttatagccaagcgcacattttccatgtttaagcttcagtcagaaaccagaggggatatgacatctctggtggaggaactggtgggaaatcaaaagctggtacaggccttttgttatgagaagaaagcagaagaaaggtttcaggaggttaacgagaagctgcgtgtgtgtgggatccgtgcgctgttcttctcttcgatcacaaatccggcaactcggtttgtaaatggtctggtatatacaggagttggtattttcggggcctttactgtattaaacggcggaattaccgtaggacagctttccagctttttgaattatgccaaccagtatacgaagccatttaatgaaatatcaggggtagtgacagaactgcagaatgcacttgcctgtgcacggcgcatttttgactttatggataccccttctgtagagccggattcggaggatgcggcggagcttaaggagtgcgacgggagtcttgaactgtctcatgtgtatttttcctattttcccggaacctctcttctggagaatattaacctgaacgtgaaacccgggcagagaattgcaattgtgggtcccacaggctgtggaaaaaccacccttatcaatctgctgatgcgattttacgatattgaccgcgggaacataaaggtgagcggatatgaggcgggacatgtgaaacgtgacagtctcaggcggcagttcggtatggtgcttcaggacacctggcttcggtcaggtaccatagcggaaaatatagcatacggaagaccggaggcatcccgggaggagattcttgaggcagcaaaagcagcctatgcccatagctttattaagcgtatgaaaaatgggtatgataccgttataacagaggacgggggcaacctgtcccaggggcaaaagcagcttttgtgtattgcaagagtaatgctgttaaaacctcccatgctgatcctggatgaggctacctcatctattgatacccgtacggagataaagatccagcaggcatttgaaaagcttatggagggcagaaccagctttattgtggcccaccgtctttctaccattaaaagtgcggatgtaatcctggttatgaaggatggcaatattatagaacaggggaatcatgaggaacttctggaagaaaatggattctatgccaaactgtatgagagccagtttgcagtctcttagcgggcggattataaaacagcagttgccttttacgaccagatttgctattctagaggatagaaaaccacaggaaacgaggaaaaattatggattcaaacagaatgaaaagcacctatatgctgcggattctggcaggggcatatctgatttatattgcgtattctcttgtggggggatatgtgaaaggggagagtccctctttttggatagcgctggcaggggtagcctttgggataataggggcaggactgctgtatttctctattaaggggtggattcgatgcaccaaagcagccaatgatccggatcctgaaccagaggatgataaaaaagaagaggatgaaaaaagagcggagtaagccggggcttacccaatgtcattaagttaagctgacattgtgaaagaggcttccgacacaatcaaaacggatatatcattgagaagtggtatgtccgtttttgtatgttttaaaaaaaatacttgacaaatttcagctcatatgcggcgcagcccttagaagaggaggtacagcatatgaatacttttgctgaaaatttaaaacatagtctgctttcaatgattgatgaaatggaattctacgagcttgattgtttcgttcataatccggacaaagattttaaacgacaacgaaaattcactttttcttctgtcatgcgttttatcttatccatgggaagcgcttctttaggtcaggaattattgaagtattttcactacaattcagatttcccctctgtttctgcatttgttcaacagcgtcagaaaattaaaccggaggctttctttgagctttttcgccgtttttctttaaaacatgaagaaatcaacctcttccgggaatatcgtctgcttgctgttgacggttcggacatctctttgcctctgaatccctcagaaccctttgcttttcctgagtccaaatgttctatgcttcatctaaatgcattgtttgatattatgagcaggcaatatgttgatgcaatcatccagggtaaacatgaatcgaatgaaaccgctgcaattgttacaatgacagatcgattaccggatcagtatcctgtcatcattgttgctgacagggggtatgaaaactacaacttctttgctcatgtggaggaacgcttttttgattatgtggtaagactgcgtacttcaaaaagccgcagcatgtttgcagggttaaagctccctgatggcaagccctttgatattacaaagaatatcgttattacgcgccattccacaggaccgtatgctgtcgataaagaaaaatacaaatatatgacaaagcagtcgcgatttgattttatccctgactgtaagcatcccgactatgaaatgcttattagatttgttagtttcccgttaaatactggagaatttgaagtccttgcaacaagccttcctgaatcagaattccctgttagcgtcttaaaagaaatctacaatcttcgctggggaattgaaacttcctttagagaacttaagcatgttgtaggtttagctgcttttcatacaaaaaaagcagactgtgctatgcaggaaatctatgcacgtctaatcatgtacaacttcagtttgcttattgcaggcaaagtgatgatacctgagcagccgtgccgaaaatacaggtatctgattaactttgctcaggctatcaggatttgtattgagtatttccgaattcacaacagcagtccgccttttgatttacaagctcttctctcacggttcatccttccagaaagaaaaggaaggacctatatccgcaaagtatatccgcagggagcaaaagctttcaactacagattaacataaatgaaaaatgggcacaagacatttatcgcctatgatggtaagcataggtgctcttttgatgcttcaaaacatacaaaaacggacataccacttctcaatgatatatccgttttgattgtgtcggaagcctctttcacaatgtcagcttaacttaatgacattgggggcttacctcgctcttttttttcgtagtctggcttttctcatcctggacggggcgagaaatacccagcacacgattcttacaagaataattccaaagaatacgcccacactgtctatcatgacatctcgtttggagggccctcttccttctacaaatgactggtgatactcatctccgcaggcaaaggccacacagatggcaccggctacaatcatgagggggatacctctcagattatatacatagagaggaaaggaaacggcaactgccaggataaaatactctgtcatatgtgccagcttgcggaccggtccatggatcttctcaacataagaatcgatctgatcctctgaaaaatcttttcccagaagatcgctgccgacggttacaattttatggcttactttgtagctgatattggacgagaccgcgccggtctgtccggaaaaagagaagatcatgtacatgattgcaagggcaggaagaaaagacagtggctttaaaagtaaaatcaaaaattttttcatttgttcacactcctatgacgagaatatatcatgttttaggagaggcgtcaaattgcttgcacctggtatttgtatatattataatggaaaaatcgggacatcccgttacggagactggcaactgattacagataaaggagaaaaaacatgagtttagcagataatatatttatcaccatgtgccgggatattatagacaacggaaccagcacagagggagagaaagtccgtccggtatgggaggacggcacctcagcctacacaatcaaacgatttggagtagtgaaccgttatgatctctcaaaggaattcccggccctgacactgcggcgcactgccttaaagagcgctatggatgagattttgtggatctggcagaagaaatccaataacattaaagagctgaacagccatgtatgggacagctgggcagatgagacgggatccatcggtaaggcctacggctaccagatgagcgtgaagcaccagtacagagaaggaatgatggatcaggtagacagggtactctttgatctgagagagaacccctacagccgcagaatcatgaccaatatctatgttcaccaggatcttcatgaaatgcacctgtatccctgtgcgtactcaatgacgtttaatgtgacgaaggagaaggacagcgatcagctgattctgaatgggattctcaatcaaagatcccaggatgttcttgctgccaacaactggaatgtgtgtcagtattcactgcttcttatgatgtttgcccaagtgtctgggatgaaggcaggggagttggtgcacgtgattgcggacgctcatatctatgatcggcatattcctctggtgcaggagcttatctcccgtccggtgtatccggcgcccaaggtgacactgaacccggagattcgggatttctatcaatttacagtgaatgatctgaccgtggaaaattaccagacgggtccccagatcaaaaatattcccatagctgtgtagaaagaaaggagaactctatgaatttaattgtagctgctgataaaaactgggggatcgggaaagacaataaacttctggtcagcattccctctgatatgaagttcttccgaacacagactaccggcaaggttgtcgttatggggagaaaaactctggaaagcttccccaatcagatgccgttaaaaaacaggacgaacataatactgaccaggaatcctgggtatagcgttaagggggggacagtggttcattccctggacgaacttacggaggcactaaagccctatgaggaggaggagatctatgtcatcggaggagacagcatttataaacttcttctgccatactgctcaacagctcatgtgacgagaatagactttgcctttgaagccgacagcttctttccgaacctggatgaggacggggagtgggaaattaccggaaaaagtgaggagcagacatattttgacctggaatatgaatttgtcaaatatgagaggaaaaaggcctgattttctcaggtctgtctcttgacagtgtctgaaaaaagtataataataaaaaaagattcatgatattgcaatgtaacacgtcgtagcgataaagtggattgtagatagaggaggaaaatcacatgttagagattaagattgagaaaactacaaatccaaaaccaattccggacaaggataatccattagtattcggtactatttttacagaccacatgtttgagatggattatacggaaggaaagggatggcacgatccacgaattgtaccatatcataacctggaactggaaccctccgccatggtgttccactatggacaggaaatgtttgaaggcttaaaagcatacaagacagaggacggaaggattctgttattccgcccggataagaatatagaaagggcaaaccattccaaccgccgcctgatgatccccgagatccctgaggatatatttatggaggcgattaagcaggttgtgaaaattgacgaggcatggatccctacaaaagaggggacatctctttacatacgtccctttgtaattgcgacagatccatttctgggagttagaccttcttatacctataaatttatgattattttatctcctgtgggagcttattacccggagggcctggatcctgttaaaatctggatcgaggatgaatatgtgagagctgtccgcggcggaattggagaggctaagaccggcggtaattacgtggcatccatggcatctcagatgaaggctcatgaggatgggtattcccaggtgctctggctggacggcgtggaaagaaagtacattgaagaagtaggcgccatgaatattttctttaaaatagatgggacagtagtgacgcctatgctgaacggctctattctttccggcgttaccagaagaacctgcatagaactttgcaaatcctggggaattcctgtggaagaaagaaaagtatctgtagatgagctggaagaggcagccagaacaggcactctggaagaggtctggggaagcggtacggcggctgttatatcaccggttggacatctccgctatgagaatgacgtattccagataggagacggaggtatcggagaactgagtcagagactatacgatacagtgacaggaatccagcttggaaagatagaagacaagtttggatggaccgttgaggtttaagaaaaaagtaagaaaagttccggaagttagcctccggaacttttttaacttttaagacctttccggaagcattgatttttcttattatatcatatataattcactgtaggacgaaacatgatagaatacaatacagatacagggagggcaagatggccaatcaggattggatcaatctgggggatgagattcgtgacatagtggagaatgctatagattcccagaattttcataaattaaatcagtcgatcagcgacacggttaccagcgcaatggagaatgtaaaccgtacgatccgaaacgcaggttctgccgccggacaggccgggcagcgcattcaggaggaagtcagagaacagcagggaagataccgttaccaaaacagaaatagctatataaggccaagggagattgtaaatagctctccttcgctctttgcaaaaaccggtccatcctcctgtgcgggatatgcactgacgatcactggggggattctcaccggcggtttggggattgctgtgttaattctcctgattgtggcgatcgcgaccggaagtatgggggcagcttttagcatccctatatttattatgcttcctctgcttatcggaagtgtgattatgacctggaagggaagcaccattttggggcggttaaaaagatttaaaaactatattcgtggcttacggggccggaattactgcggaataaaggaattggcccggctggtgggaaaatcagaaaattatgtgattaaggacctgagaaatatgatagagagaggtttgtttctgcagggacatctggatcagcagaatacctgcctgattgcatctgatgatgtgtacgaacagtaccagctggcccaaaagcagctggagatccgacaaaaggaattgcagcaggaggcagcaaagcccaaaagcggtttgtcggaggaggccagaaaggtaattaaggaaggaaatgattatctggaagcaatcaaagggagcaatgacgctattccaggggttgagatatcgaaaaagatttcccgtctggaagtggtgatacaaaagattttccagcgggtggagcagcatccggagttgatttcggatctgagaaaatttatggattactatctgcccactacgatgaaactgctgaaggcctatgaggaactggatgcccagccggtgcagggggagaatatagcaactgcaaaaagagagatagaagagactttggacactatcagcacggcatttgagaatctgctggacagtttctttaaggacacggcatgggatatctccacggacatctctgtgcttcagactatgctggcacaagagggcctgacaaaaaaggacttttaagaaaagaggataacatatgagcgaagaatttaaggatttcactgcaacccctacactgacctttgatcctcttcccacaaaggaagagatcatagagcctaagcctcaggagcctgagaagacctggaatgatgatattctctccgcggaggagattaaaatggtggacgagttcgcccagcagatagatctgaataattccaatgctatccttcagtacggagcgggaacccagaaaaaaatggctgatttctctgaaggggccctggaaaatgtaaagacaaaggatctgggagagattggagatctcctttccaatgtggtgtccgagttgaaaagctttgatgtggaagaagaagaaaagggtttcctgggatttttcaaaaagacttccaacaagattactgccatgaagacaaagtttgacaaaactgaggtaaatatagacaagatttgtcaggtgctggagaaacatcagattcagcttttgaaggacatagcagtgctggataagatgtatcagttgaatctgacctattttaaagagctgtccatgtacattctggcaggaaagaagaagcttcaggaggtcagggggaaggaactcagcagccttatggcaaaggcgcagtccagcggacttccagaggacgcccaggctgccaaggatctggactccctttgtaatcgatttgagaaaaagattcatgatctggagttaaccaggatgatctctatccagacggcaccacagattcgtctggttcagggcaatgataccctgatggcagagaagattcagtccactttggtaaacacaatccctctgtggaaaagtcagatggtgctggcactgggtgtggctcattccacccaggcagcagaggctcagcgccaggtgacagatatgacaaatgatctgctgagaaagaatgcagagacactgaagctggctaccatagagactgcaaaagaatcagagcggggcatagtagatatggagacgctgaagatgaccaacgaatctcttatctctacgctggatgaggtgatgaagattcagcaggaaggaaagcagaagcgaagggaagctgaggtggaaatgaaccgcctggaaaatgaactgaaaacgaaattattgcagattaacggttgagaatcgtaaggaacaatatatggctgggaagagaccggtacagaacaggtaatacatacctgttctgtaccggttttttgctgcaatggaatacggaggttcaaaaaatgaacaaaagtacttgacaatcccttcaaacagaagtaaaatgatggaagttcaaaaaatgaacaaagatggagggagcacagaatgtacaaatggagaaggcggggagaggcattgttttttatattgccgattctgatacccctaatcgtattttggatttaccctattattcgttccggatggatcagttttacaaattgggattatatgaccccggaatatgattttgtagggttgaaaaattataaagatctattgagcacaggaggatttttccctgctcttaaaaatacactggtcttcggactggggacagcgattccggtgattgccgggggatttttgcttgccgttctggtgagaagtctgaagaaagggagcaaagtttaccagtttatcttattttcaccctggattacccctacggtggctatctctatcgtctggacttggatctttgaaccggataccgggattgccaatctcgtgcttcgttttttacatatgccggctctgcagtggctgcacagttctcaaacggcaatgctctccgtgattctggttaccctctggaagaccttggggtatgccatgatattctatctgacggcattggcaaaggttccggaagagctgtacgatgcgggcaaggtagacggggcatccagactggcactcatgagacatataactgtacctatggtttcccccaccaccttgtttctggttgttctgaatacagtcaatgccctccaggcctacgaccagattcaggttctgacccagggaggcccctctggaagtacccgaacactgctgtatctttattaccagctgggttttgaacagtttcatatggggcaggctgcagcatctggtgtgcttctggtgatcattgcgtcagcgctggcgggaatacagtttgcggtttcaaaaaaatcagtacattattagaaagggagtgttccagttatggaaaatttacaggcactgaagcttccctcagggaagacagcccaggagcgatgtataagaaggactgcaaaggtgggaaagctggcgtggataaccggagaggcagtaaagcacgtatttcttgctggaatcagccttgttatggcattcccgtttttatggatggtcatcagcgcgcttaagacaaaagcagaggttatgaatacagaaatttttttgcctcaggaggcacagtgggggaactttgcggaagtgatttttcattctcccatcctccggtatatgggaaacagccttctggtgtcggcggccattgtccttcttcaggtggttaccgggggtatgatggcatatgcgctctcatttatgaggttccggggccgtaaagccttgtttctggtggtggtgggaacctatatgcttcctcccgcagctacatacatcccgggctatattatattatcccaactgaacctgctggacagtctgacaggacttaccatatcctgtacggtaaatatttttgggatctttctgctccggcaggcatttatgcagctgccctacggattggttgaagcggccaaggtagacggagccaggccgtggtatattctgtggaatattgtgttcccgcttacccgcccaacttttattacatttattcttatgagctttatcacaagctataacagctatatgtggccctctcttatcacagagacaccggataaggcgctcatctctcaggggctgcggatgttttttatagaaggcggtgcttacggcacagaatggcctaaggtaatggcggccagtgcggtcattgtcattccccttttgctgttgtttttatttacacaaaaatggtttattaaagggatcagcgatacagggatgaaagggtaacagaaggaaaggattcagagaggagataagaattatgaaaacaaagaaggcagcagcagcggtacttgttctgagtttgtgtaccggacttatgggaggatgtcaaaagacggcgcaggctgacagcaaagaagatgctggagacagggtacaagtgaaagtatggtattccgggggcaagacggccaccaaggtgctggatgaaattattcagcagtttaacagcagccaggacacctatgaagcaaaaggggtagtccaggcggattacgatgagacctacgagaaactccaggcagccattgcggggaaaaagcagccggatgtggtgcttctggatgcagacaaagcagtaaacctggcagaaaaggggcttctggaagatctgaaggcttttgtggaaaaggatgcgtccatgaatacagaagattttatcccagtattttacaatcagggatttacagagaatggagagctattcgctattccggcctacggaactacgcaggtgatgtactataacatggaagcttttgagaaggcaggcattcaggcggacaacataaagacctggcaggatcttgcccaggcagccgagggtatgacggtcagggatggagaggaaaccaccttctacggatgggagcctatgtacaatgaggataatcttatggatgcggtattcagcaatggaggctctgtatttagtgacgacggcaaatccgttttgatcaattccaaggaatgggtggaggtttgggaagccttccgccagtggattcacgaggataagactatgaggatacattacggcggacagggctggcagtactggtatgacaccatggatgatgttctccagaaccgggcaggagggtataccggctcatcaggagatcaggcggatcttgacttttcggtggtggcagccatgcctcagccgggattccatgataatcctccggcaccagttgccagggctctgcagtttaccatggtgaagggcggcagcgacgaggcaaagcagggggcctatgaatttatgaaatactttacagaggctgagcagcaggcaaaatggtcgatggaaaccggctatgtggcagtccgtcagtctgtcaaagaaaatgaggcattccaggcatttgccgaggagaatccgcagattctagttccgctggaacagtctatgcacgcatccattcttcctattgatcccacagggggaaaggtatatgatgctctgaagatagctgcggacaaagttgaaattgagaatataccggcacaggaagcgctggacgaggcacagaagacagcgcaggaagcgctggacgctctgtaatcatctgcaggggcgggggaatatggaaattccttcgctcctgatgggatcttgaagcaaaatgagttataatgacagataggaagctcccaacttgtacccgaggttatatcttaatgctgctcttttggctggcaaatgggtacaccgttcattaaaatataatttgggagcccaactgcaaacactttgtataaatttttttcaggtgcgaaccataagtgaacatagaattaccgggggattcgcacttgaaataggggaatacttgtttggaaaaaggaaaagaaaagtacgggatattgtatttttgtatggaattaacaaaaatgaagtggtaaaatagagttaaattatgtataattgctgtcactgcctgcgagggcagtgtggatagaaatctataccgtagcacagttaaaacaggctgccaagtcactgcctgcgagggcagtgtggatagaaatcatcatctatgctcgtaaatacggggtgacaatgtcactgcctgcgagggcagtgtggatagaaatccggcaatacctggtacgctaccggagcttgtatagtcactgcctgcgagggcagtgtggatagaaatactgatgcatataaatcaaaactggacgggataggtcactgcctgcgagggcagtgtggatagaaatacatctactccggcctgatagcactccgaaatgaagtcactgcctgcgagggcagtgtggatagaaattttaaaattaatagagtataaatccccatacgaagtcactgcctgcgaggcagtgtggtttgagagcattgtcaaatcacacaatacgtagtaaaatatagtcactgtctgcgaggacagcatggattgaaatattgaatttaacgttcttatataaaatcaggaaagaaatggagaatatgcaatgtacagagatcgtacaaaagttgtttctataggggacagggttatcggcggcggtaatcctgttcttatccagtctatgacaaatacaaaaacagaggatattaaggggacagttgctcagattcgggccctcacggcggcggggtgcgagatcgtcaggtgtacagtacctactatggaggcggctctggccctaagagagattaaacagctgatttctgtccccctagtggcagatatacattttgactaccgcatggctatagctgctattgagaacggggcggataagattaggattaacccggggaacattggcagcagagagcgtatcaaggccgtggtggatgcggcaaaggagagaagcgttcctatccgtgtgggggtaaacagcggttccctggaaaaggaactggtggagcggtatcacggggtgacagcagagggacttgtggaaagcgcactggacaaagtgaagatcattgaggagctgggttatgacaatctggtgatcagcattaagtcctcagatgtaatgatgtgtgtgaaagcccatgagttaattgccagcagaacacagtaccctctgcatgtgggaattaccgaggcgggaactctgtattccgggaatattaagtctgccgtggggctgggaattattttgtatcagggaatcggcgatactattcgggtgtcactgacaggagatccggtggaagaaattaaatctgccaaagggattttgaaaaccctggggctccgaaagggagggatagaagtggtctcctgtcctacctgcggacgcacggagattgatcttattggactggccaatcaggtggagactatggtgcaggaatttcctctggacattaaggtggctgtgatgggatgtgtggtcaatggaccgggagaggctaaggaagccgatatcggaatcgccggaggcaaaggcgtggggctactgattaaaaagggggagataatccgcaaggtacctgaggatgaactcctttcctgtctgcgcaaggagctggaacattgggaacaataggagttttgtaatatggaaaaagatttttttgaggtttttcccaatcttaaagtagaagataaacttcaggaactgctggatggagttcaggtgactaaggtagccgccaattctgccaaagaccggttgagggtatatctcctcagccgtcagtggatacataaaaaatatatttatgatttggaagaggctatctcctcccagtttttcccgggggtgtccatggaagtgaaaatcatagaaaaattcagcctttcctcccagtacacgccggaaaacctctatgaagtctatcggaacagtatgctgacagaactgaaggaatacagtatcctcgtctataatctgctggccacagcaaaggtggagtttccggagccggaacgtatggttcttcagattccccaatcggtgcttgctgccacgaaggagaaagagctgacggagtatctggaaaaggtgttctgcgagcggtgcggattatctctgaaggtagagcccttgtatatggaggccaaggagagcaaatccagaaagaacagtgaactgaggatccagcaggaagctgcccatatcattgcccagtcgtcctttggaaacaaagccggggaaagctaccctgaggaggaactccatgaggaggcattgccgcagaagtccatggaaaaagaaaagccggcgcctgagaagaaaaaagatgttcctgcacagggaaaaaacgcgtccaagacttccgggaaggccggggcggcagataagagaaatggtaagggaagctttgggaagaatactgggggcggagacttccgccgttctgtgaagcgttctgacaatccggaggtgttgtatggacgtgattttgatgatgaggcactgcctctggagcatattacgggagaaatgggagaagtctgtattcgcgggaaaatcatgtctctggagaccagagaaatcagaaatgaaaagacaattatcatattctccatgacggattttacagactctatcactgtgaaaatgtttgccagaaatgatcaggtggaggagattctggccgggataaaagtgaaatcatttattaagctgaaaggtgtcactaccattgaccgtttcgacagtgaattaacaataggctcagttgtgggaataaaaaagattgctgactttaccagcagccgggcagacaccagtccggaaaagcgtgtggagcttcactgtcacacgaagatgagtgaaatggacggtgtctcagatgccaaagctctgattatgagggcatttgagtggggacataaggccatagcgatcacagaccacggggtcgttcagggattcccggatgctcttcacgctacctgggatatgcctaaggatgcggatttcaaaattatctatggggtggaggcatatctggtagatgatctcaagggcattgtatccaacagcaaaggacagaatctggatggcacttttgtggtgtttgacatcgagactaccggtttcagccctctggcgaataaaattattgaaataggggcagtgagagtggaagggggaaagattacagatcgattctccacgttcgtgaatcctaaggtgcccattcctttccggattgagactcttacggggataaatgataacatggtttcccaggcagaggagattacagatattctgccccggttcatggagttctgccagggggcagtcatggtggctcacaatgcagagtttgatatgagctttattcagaaaaactgtgaagatctgggcattgagacggattttacctatgcagacaccgtaggaatggcaagatttcttttgcctgccctgaatcggtttaagctggatactgtggccaaagcagtgggggtttctctgcagaaccatcaccgggcggtggatgacgcggcctgtacggcagaaatctttgtgaaatttattgaaatgctaaaggagagggaaatagagaatctggatcagctgaatgaagcaggggcagttacccctgaggtggtaatgaagatgcccacctaccatgcgattattctggccaccagcgatcagggaagggtgaatctctataaaattatatcccagtcccacctcacatactataaccggaggccaagggtgccaaagagtctgtatctgaagcttcaggaggggctgctcattggctctgcctgtgaggcaggggagctgtaccaggcgattctaaacggcagaccagagacggagattgcaaggctggctgatttctatgattatctggaaatccagcccctggggaataatggatttatgctgagaagcgataagatagaggtttccacccaggaggacctgatggacattaaccgcaggattgtgaaactgggagaacagttcaataaaccagtggttgccacttgtgacgtccactttctggatcccgaggacgaagtctaccggagaattataatggcaggaaaaggatttgacgacgcggatgatcaggcgcccctgtacctgcgcaccacagaagaaatgctggccgaattctcctatctgggaagggaaaaagcagaggaagtagtgattacgaataccaatagaattgcggatatgtgtgaaaaaatatcaccggttcataaggggaaatgccctccggtgattcccaattccgacgagatgctccgggaactctgttatcagaaagcccacgagatctatggagaggagcttccctctcccgttaccgagcggctggaaagagaattaaattctattatatccaacggctatgcggttatgtatatgattgcacagaagctggtgtggaaatctaacagtgacggctatctggtaggctcccgtggatctgtaggttcttctttcgccgcaaccatgtccgggattacagaggtgaatcccctgagccctcattattactgcgcagagtgtcactactgcgactttgactcggaagatgtaaaaaagtacgccggaggcgctggctgtgacatgccggataaagtctgcccggtgtgcggggccaatctccagaaagaagggtttgatatcccgtttgaaacatttctgggatttaaaggggataaggagcctgatattgacctcaacttctccggggactaccagggaaaggctcaccgttatgtggaagttatctttggctacggccagacctttaaagcgggaaccattggcacactggcagaaaagacggctttcggctatgtgaaaaattattatgaggagaggggatccagaaaaaggaactgtgagattaaccggattgtccagggctgtaccggtgtacgcaggaccactggccagcatccgggagggatcattgtactacccatcggatgggatattgaagagtttaccccggtgcagcaccctgccaatgatatgggcagtgatattataaccacacattttgattatcattccattgattccaacttgctgaagctggatattctgggacacgatgatcctaccatgatccgtatgctggaagacctgacagggattaatgccagggaaattcctctggacagccaggaggtaatgtccctgttccaggggacagaggctctgggtattactccggaggatataaggggatgtcctttgggatgcctgggggttccggagttcggtacagagtttgctatgcagatgctgattgatacccagcccaagtctttctctgatttggtgcgtatcgccgggctggctcatggtacggatgtttggctgggcaatgcccagacgctgatacaggagggaaaggccaccatctccaccgctatctgcaccagggatgatattatgatctatctgatacagaaaggactggagagcggcctctcctttaccatcatggagtctgtgcggaagggcaagggactgaagccggagtgggaagaagagatgacgaagcatggggtgccggactggtatatctggtcctgtaaaaagattaagtacatgttccccaaagcacatgccgcggcgtatgttatgatggctttccggattgcctattgtaagattttttatcctctggcatactatgctgctttcttcagcatcagggccacggcgttttcctatgaacttatgtgtcagggaaaagagaaactggaatattttatggatgattatcaaaagcgtatggataccctgagtaaaaaagagcaggatacctacaaggatatgaaggtagtgcaggagatgtatgcacgggggtttgaatttgttcccattgatctttaccgggcggaggctcataccttccggattgtagatgggaagctgatgccggcgttagataccatcgaaggacttggagaccgtgcggccgatgctgtggtggaagcggccgcctgcggggaatttttgtcaaaggatgatttccggatacgtaccaaggtgagtaagacggtcattgatctgatgagcgatctgaacctgttcggggatattccggattccaatcagatgtctctctttgatttccagtagaatttttatagatggtatagtataatagttgtaaatgacgggaggcaaaaggatgaaacgatttctggaaaaaggtgcacctatactgataataattatcctgtgtatcctggtccttgtttgggctctgggaggctttcttgcaggtacgtttgcagggggaagtgttctgatagggggagtgttttttctgatcggtcttgccgttatagctgctctgattgtcacactggtgaagcgaatcaaagagatcgacgatgaggatgatttgagcaaatattaacagtactcacagagggaggtaatgaaatatgcttattatgactgcggatgcaatacccggcagaaaatatgagatgcttgggattgccaagggttctactattcagacggttcacgccggcaaggatattatgaacagctttaaaacactggtaggaggagaattgacctcttacaatgagatgatgaataaagcgagagcgctggccaccaagagactggaggaggatgcacagagcatgggagcagatgccgtagtggctatgaggtattcgtccagctcagtgatgcagggagcatctgagattatggcctatgggacagcaatacgcttcactgattagacaaaaaagagactgtaatcagccgtgacaaaggcttagattacagtcttttttattacataggaaacttcgttccctatgtaataaaaaaccctccgggggatcccgccggggcggaaaggaagatgctgtctgcgacagcccgccgcaggcggagattgcgctttcgcgcaatcttttatggaaaaaagattacgggcacagcagttcccggaaggcacccaggagtctatcgttttgttcatgattcataatgcagaaccggacatagctctcatctaaaaatggaaatgtggaacaattccgtatcataagaccttttcttatacagtgttcaaaaagctcctctgcggttaccccctcctttaatagtctgaccagtataaagttcccctttggctcatagattttgacactgtcccaggtacgaagctccctgcagattctgtcgcgttcagaaaagatgaggtctttggttgcctgtatatactctgtatcccggaacataatctgccctccaatttcggccagagagttgatggtccaggggttttttcgtgtattgatttgcttcaccatatcctggttaccggtgatcgcataccccaggcgcaggccgggtgccgcaaagaactttgagattccgcgcaggataattagattattatagtaatttgtcagggggacagaagtgatctcctgttcctggggggcgaattccacgtaggtttcgtccaccataacaaagataccgtgctccaggcaggtatccaggatctgacgcatctgtgtactggtaagggctgttgaggtagggttattgggattgcagagtaccagaagatctatcccctctgtgagatggctgcaaaaatcatcggtatccatctgaaagtcattctcttctttcagaggataatagagggtggtacctccgcccagagtgatttccctttcatattcggaatatgtgggtcccagtattaaggcctttttggggtgctctgtctgaataaacagggagatcagttctgtggatccatttcccacaatgatattctccagctgggctcctgtataggcggcgatgcactggcggagttttttataatcccgatccggataactggtaacggcatcaatatgatccgacaatgttttcctcaattggtaggaaactcctaatggattaacattggcgctgaagcttgtgatctcttccttctttattccgtagatttcctcaattttctctaaatcactgccatgaaaatggtccttgtgttttaacatgtgctctccctctttctgaaattcacctgtaaattgtacgatatagttcccgcacctctgctgcgccaggtgttctgcgcagcaaaatcccgccgtggcaagcacctgaatgcatcgtgaagcgtgataccggacacggagtaaacaatagcgataggcccgggggaatggggtgcgtgaaatattggttggttgcaacgttgccccgggtagtgtataatccattatagcgagatatgataaatagttcaagagataacggggtataggtgaatactttgaagagaagaatagaacagctaattaacggtagatatgaatatgaagtacctaagcttttgttatcccaggatagtattgtactgcagaccagggcgggggagaattgccgtggagagctgcatctgggagcagaagatcagagaaagataaaaggaattgcagcttcttcccacagaagatttcttctgggaaaggaacgcttttccggaaccacggcagctttgccctatgtggtagatgtgaagggactgaaggcgggggatatgtgtgaagggacattaaccctcagtacagatatcggagagtaccaggttccatttacggtagccatactgagaaaccaggtgcgcacttctgtaggagagattcggactcttgaccagtttgtgacactggcaaaggctgatttcagagaggccttccatctttttgtagatgaggcgtttgccgggctgctcagacatgaggatgagaagctttggctggcgtaccggggaatgtctgtaaatcctgtgacctaccagcatcttgaggaatttctcatcggcatcgggaaaaaagaaccgattaaactttccctgggaagggaatccgtggagctttacgaggtggaaggctctttaaaggataccctgatgctccacaggaacggctggggctatgtgagggcagaggtgtctgtccagggagattttctcgaggtggaaaagaaagtaatcaccacagaggattttatcggcagtgtctatggtttagaatatattgtccgcagggagtatctgggcagagggaaaaattacggcagaatcattgtaaagaccgtttatgagacccaggtttttcaagtggtggcttccaggcacaataagatacaggtgaatgtatctgcctatgaaaagaaaaagaaatatgagctggccaggcattatctggagatgtctgtgaaccgtatcccctttaaggaatggtatgataaaagtctatctcttctggaagaattgaaggacacaggttatgtggatacaggctatgagcttctggaggcgtatctgtattaccgcgccggactctttgacaaggcggctgaggtactggaaaagctggagaattcaacggcactggaggagcttccggagatggagggctgctatttgtatctgaatgcctgcactggacgcctgaagctggagcgcagggattatctgaagcgtcttcacaccttatctcagatgcaggaggacagctttattctgctctggattctgctgcaggaggacagcgaagcttaccgcaccccatctaaaaaattatatgaactggagacacagtacgagatcgggtgccgcagtccattcctctatctggaagcctttcggctgataaaggagaatgttctgctttttcgaaaaatcaacagattttatattcaggtattattcttcgcaaagaaatacggcctgctcacagaggaaatcgttggcagaacggcatacctctcaggatacctgaaatcatttcaccaggtgatttatgaacttatggcggaggcatatgagcagtacccctccagggatcttctggacgcagtctgcaagcttctgatgaagggcaatccgagaaaaaaagagtattttaagtggtatgagctggcagtggaagaggaactgcgtattacccgtctgtatgaatattatatagaaacaatgagccgcaattaccagggtaccctaccccaggtgatccgcatgtattttgcttacaataatacacttagtgacggtaagaaggcatttgtgtacagcaatgtaatccgaaacaaaagtacggataagaatacttatctgagttataaaagtgctatgaaggcatttgcctggaacaagctgtcagaaagccgaatgaatgaagactatgcggtattgtaccaggagttctgcatgcaccccggggaagaaaaggaaagggcagctctggcaaaggtactttttattcatcgcctttatctggaggatacaaaaatccgaaaagtaatcgtatgccacgatgccctgaaaaaggaagaggcatacccatgtgtggacggtgtggcgtatatctccgtatataccccggatgccagaattctgttcgaagatgaaaagcgcagacgctatatggggacagtagattataaccttcaaaagctgttggatgaaaaagaagcagtttctctgcttgccgcctcagaggtgaatcattccggattcctgctccatgtgtgcggggaactggatcattccgaaaagattactaaagacaatgtaggctgctttcataaaattgtggaggacccctcatttcaaacagaatacagggagtgcatccgtcagcgcattctggaatatttccaggagaatgtagagaatgataatctaaaggattatctgcggcaaatggactttaaaggatttgcaaaagtgaataaatcccttctggttaaaatactggtgaatcagggcatgtatgtaggggcctttgatctcctctgcgaattcggatatgagggtgtggacacagaggttctgctgaagctctgcagcaggatgattctaaatatggagtttgaatacgaggaggaactggttcttctggggtggtatgtatacgtccagggcaaatacgatgatattattctgcattacctctcaatgttctatgagggacccgctgaggagatggcacgtctgtggcagagtacgcagggcttccagatagaagcctatgagctggaggagaagatactcacatacagcatgtttgcaagaacgtacctccctctgggttctaaggtgctggaaagttacctgaaacaggccgggaaggaacaggtgattctggcctatctgacctttgaagcattcggctattttctgggaggaaaggaaacagatatctttatcttccagtgtctggagaaaatcacagaaagagagtgggagtctgatatgatctgcaagcttgcacttttgaaatggctctctgtgacacaggactggaatccggaagaggagaagctggttcgaaggctgctctgggaatgcagcagaatggggcttcggtttgcttttttccaggcattccccaaagaatatctccgctcctaccagctggaggacaaggtctttgccgagtaccgggcaggacttcattccagagttaccctgtactattgcctggaggaagagggaaaagcaggggattataaaagtgagccgctcaaagagatgtaccagggaatctacagcaaagagtttgtacttttctacggcgaaatgttaacttattatttccaggcagaaaaagatgggaagacctataccacagaacccagaacgattactgtcacagaggtagatgcctcaggtgatacaaagtatcagatgctgaaccagatgctggcagttaaaaagcttggaaaagaggatgagctcagaaatatattaaagaaatatctggagagagaagcggtcatacagcaattattcaggattacggaatagggaggcctaaaagaacatgaatgagacaaagaatataattgtgggactggaactggggtctaagacttctcagctttgctattatgacagaaaagagaaggaacccatctccctgtcacctaaggtgggaagcaaccagtatccatttcccaccagcctctccaaaaagccgggagaagatgtatggcacctggggctggaggccgaatattttgcctcccagcagggggagattatgatagatgatttcttcgggatactgaatcaggaggaagaggtgctggtggacggacagctgacagagccctataaggttgccggcgcatatctgaaggagacaatgaagcttctcggagtgtcggatctggtgcgacaggtaagtgctctgatgataaccacagaacaacttacccaggcaatggtgcataatcttcagagagcctgtgaggaaattggattctccaggaaaaggtgttttctgcaggactttgaggagagtttcttctgctatgtactgaatcagaaagctgagtactggagcagaaaggtggcctggtttacctttgacagggatcaggtatcttttgcgcagctggtaattgatcagaaaacaaagcccatgattgtgagaattttgagggggaggaccatccagctgtctgaggatcctgcggagcgggacttggaattttatcagctgattcatgagtcgttcggcactgacaattattccagcatctacattgtgggggaaggctttgacaaggaatgggccgtccggtcagttcccctcctctgcaaaaacagacgacacgtgttctatggaaacaacctgtttgtgaaaggggcctgctatggcgccagggaaaaggtagaggagagaaatctgaaaaactacctgttcagcgggcagggacttataaagagcaatataggcatggagatggctgtgcagggttcccaggcatattatcccattatagaggcagggaataactggtacgaatgtatcagagaatttgaaattatattagataatacagaggagcttacctttcttgtcaatcccatggaagggaagatccgtacccggtacagtatgaagcttccggggctgcccaagcggccaaacaaaaccacaagacttcagatccgggtagaatatgaatccgcatctgtgtgtgtgattacagtgacggatatgggattcggggaaatgttccccgccagcggtcaggtatggaccgagaaggtatcatggtagaggaggaagcagatgggcggttacatattatgccaggtaagaaaggcgcagatgccgtattatatagagagtatcagcacaaatatctacaccatagaagaattatgttattatctgtatcacaatatctatttgctggacgatacaatcatcaacgagcagctgtgcgactggatacggaaggaactgggcttggaaaagctctaccacaagctgtaccggacgctggaaaataatgagagcatcgggaatttcatcctctctgtctttaaggagattaattatctgaatcacagtgaattcaaagagatgaatcagcagctggaagctctggaagcgcagcctccggcgatccggcagaagaaaaaaggggattatctggtggaaaaccatatgtatgtgaatgccatcaaggtatatgaagatgccgtgactctggtggaggataccaatcttggggaacagtttgtgggtgagatacatcacaatatggggtgcgcctatctgaatctttttcagttggaggaagctgtactctgctttgccagggcatatgaagaacttcacacaaaggcatctctgaaacattatctgattgcctgctatctgtgcagttcgcccggggagtgggagcaggaatgcgccaggatgggagtggacacccagacgaaaaaggaattggtaagagagattgaagaggctgccaacagcatcggacaggcagctgcgtctaaggatacagacggtatcttaaaaagtctgacaagggactatcacagaagcactggcttttgaggaaacggcgtattttcttgacaagaagcagtgcttcgtgttagtattttcttacactttagtatggtagagttgtctcatgctaaaagagtaacagataaaaatttgggaggaagtattaaaatgaaaaagaaattacttggaactttactggctgctgttatgactgccgctatgctggcaggctgcggcaatacaggggactcatctgattctgcagacggggaaaaagatgcaaaaacagaggatactgaaaagaaggcagattcctctgaggatgcaaaagacgaagccgcaccggatgacaatacctttacagttggtttcgaccaggaattccctccgatgggatttgtggatgagaacggagagttcacaggatttgacctggaacttgcggaggaagtggcaacccgcctgggaatgaaattcgtaccccagccaatctcctgggatgccaaggatatggagcttgattccggtaccatagactgtatctggaacggctttaccatgaccggaagagaagatcagtatacatggtcagaaccgtatctaaaaaatgcccaggtatttgttgtggcagattcttccattaaaacaagagaggatcttgcagggaagattgtagaagttcaggcagattcttctgcggaggcagctttaaaggaagatccggatcttacaggcaccttcgctcagcttcagactgtaccggattataacacagctgttatggatctgcagcagggggcagtggacgccattgccatggacaaagtagtcgccgcttaccagattgagggcagaggggaagagcttaccattctggacgatgaactgcaggccgaagaatacggaattggattcaaattaggaaatacggacttgagagacaaggttcagtccaccctggaagagatggcgtcagatggaaaactggctgaaatttcaactaaatggtttggagaagatatcactacagtgggtaaataaaggtaaaattaaagtgtgcggcctctcaccagcagatgccgcatactgtacgtatccggcaggattacaaacgataaacaattaggaggaagcgctgctatgaatctactggagatttttggtcagctgtcagcaggaatgctggcatcaatacagatttttgttcttactctgatcttttcactgcccctggggcttttggtggcattcggaagaatgtcaaagaatgtgataatcagaaccatcatcaaggtttatatatccataatgagaggaacaccgctgatgctccagttgatggtgctgtactttggaccgtattttctgctgggaataagagttacaaatgaataccggttttacgcggttatcataggatttgcactgaattatgcggcatattttgcggaaatataccggggcggcattgaatccatggaaccggggcagtacgaagccgcgcagctacttgggtataacaaaagccagacgttttttaagattatcatgccccaggtgtttaagaggatccttccctctgttaccaatgaggttatcactcttgtgaaggatacttcccttgcgtttgccatcgcttatctggaaatgttcactatggcaaaagcgctggcttcttctcagaagagcatgctgccttttgtggcagcggcaattttctactatgtatttaatctgattgtagcattgataatggaaaaactggagaagaagatggattactaccattaggaggatgtacgatgtatctgttggaaatgaaccatatagaaaaaggttttgacgggctgggtgtcttaaaagatatctccctgtccgtaaaggaaggagagattctttctattataggtccttctggatccggtaaatccaccctgctccgctgtgccaccatgctggaaaagattgacggaggagagatcctctatctgggggaacgggctgcctatataggggagaatcacaaaccggtatataagaagggggaggagagacggaagctccagagctactttggactggtattccagaatttcaatctatttccccactattccgttatgaagaacattacagatgctcccatacatattcaaaaaaggaacagggaagaggtataccaggaggccaggagccttctgaaaaagatggggctggaggaaaaagagaacgcatatccctgccagctgtcgggaggccagtgccagcgggtggctattgccagagcacttgccctgaatccgaagattttatttttcgacgagccgacgtcggccctggatccggaacttacaggggaagtgctgaaggtgataaaatctttagcagatatggatattactatggtaattgttacccatgagatgaactttgcgagagatatctcggacagaattatctttatggaccagggagtcatagcggtggaaggaacgcctgaggaggtgttctctacggaacacgtcagaatgaaagaatttcttggaaagtttcatcaggcatagcagtataaagcagcagcggtcaaagacggtcttttaacatgccggaatccgggctgcttttcttttggtaaaattctggtaaaacaaaaatatatttttaaagacgaaaaaatattggtgtcataaaggcccggaaattgccgaagttaggcttgttttttacataggtatggtatataatccttgtgtaaatttaaactattattatggaaaaaggataggtgtacgaaggtgaaaaaattagaacaattatacgaaggcaaagctaaaaaagtatttgcaacagaggacaaagatgtggtaatcgttgattacaaggacgacgcaactgcatttaacggagagaaaaagggaaccatcgtgggaaagggcgttatcaacaaccgcatgtccaaccgtgtgttccaattgattgaaaaagccggagtaccgactcattttatagaagaattaagtgacagagagactgctgtgaagcatgtggagattgttcccctggaggttattgtgcggaatgtggcagcgggaagtttttccaaaaagctgggcattgaagaaggaagagagctcctctgtcctacctttgaattcagttataaaaatgatgaccttggggatccatttatcaatgattcctatgcgcttgctctgggacttgccacccaggaagagattgaccagatcagagaatatacaatgaaaatcaatgaggtattaaaggagtatttcttgcaggccggtattaaattgattgactttaaaattgaattcggccgttatcacggagagattattctggcagacgagatttccccggatacctgcagactctgggatgtgaataccaatgaaaaactggataaggaccgtttcagacgtgacatgggtaatgtagaggaagcatacaacgaagtattcagccgtttaggactttaattgactgactggaaaggttgcgtccatgaataaagatatgatacacgaacaaggagaagtgactgataagttaagggaagagtgcggtgtctttggcatctatgacctggatggacaggacgtggcatcaaccatttattatggactgtttgcccttcagcaccgtggacaggaaagctgcggcattgccgtaagcgatacgcatggtccaaagggaaaggtcagttcctttaaaggaatggggctggccaatgaagtatttaatgaaaaaacactggaatcccttcacggcgatataggggtagggcatgtccgctattccacggcaggggcaagtaccagagaaaatgcccagccgttagttttgaattatattaagggcacgctgggacttgcccacaatgggaatctgatcaatgccctggagctcagaaaagagctggagtacggaggggcaattttccagacaaccattgattccgaggtgattgcttaccacattgccagagagcgggtaaagacaaaatctgtggaggaagcggtaaggaatgccatgaagaagatggagggagcctattcgctgatcgtaatgtcccccagaaaactcattggggccagagatccgtacggatttaagcctctctgtatcggcagaagagataattcctatattctggcgtctgaaacctgcgctttggataccgtgggggcagaatttgtcagagatgtagagcccggagagctggtggtgattaccagagacggcatagtttctgataaaagtatgtgcctgccaggggagaagcatgcgcgctgtatctttgagtatatttattttgcccgtccggacagccatattgacggtgtcagtgtctatgcgtccagaatcaaggcgggaagagctctggcaaaggattctccggtggaggcggatctggttgtgggagtgcccgaatcgggaaatgccgcagctctggggtactctctggaatcagggataccctatggtacagcctttgttaagaacagctatgtgggccggacatttatcaaaccaaagcagagcagccggatatccagtgtccgtgtgaaattgaatgcattaaaagaggtagtagccggcaagcgtgtcataatgatagatgactctattgtccggggaactaccagcggcagaattgtgaagatgctcagggatgcgggtgctacagaagtgcatatgagagtcagctctcccccgtttttatggccctgttattttggaacagatgtgcctgcgcgggaacaattgctggcctataaccgcaccgtagaagaaatatgtgagaaaatcggagctgacagtctgggatatcttgaaattgacaggctgcaggaactcacagacggacttgaaatctgcaggggatgctttacgggaatctatcccatggatcccccaacagaagacatccgcggcgattttgaactatagaggagagaatacatgaatacagacagatatcaaagcccattgtcacagcgctacgccagcaaagagatgcagtatttattttccccggacaagaagttccgtacctggaggaagctctggatcgcactggctgagacagaaaaggagctgggacttaatattacccaggagcagatcgatgaaatgaaggcaaatgcggaggacatcaactactttgtggcccaggagagagaaaagcaggtgcgccatgacgtaatgtcacacgtttatgcttatggggtacagtgcccgaaggcaaaagggattatccacctgggggcaacctcctgctatgtgggagataatacagatatcattgtgatgacagaagccttacaactggtaaagaagaaactggttaatgtcatcgcggagctggcaaagtttgcagaggaatacaaagagcttcctaccctggcattcacacatttccagcctgcacagcctacaacagtaggaaagagggcgactctgtggatgcaggaatttacactggatctggaggacgtggactatgttttaaataatatgaagcttcttggatctaagggaactacagggacccaggcaagcttcctggaattatttgacggggatcaggaaaaaatagaaaagatagatcctatgatagcggaaaaaatgggatttaaggagtgctatcctgtatcaggacagacctattcccgtaagatagataccagagttttaaacgtactggccggaattgctgccagtgcgcataaattttccaatgatatccgactcctgcagcacttaaaagaggtggaggaaccctttgaaaaaagtcagattggatcctccgctatggcatacaagaggaatcccatgagaagcgagcgcattgcttccctgtccagattcgtgatggtagatgccatgaatccggcaattacatccgcaacccagtggtttgaaagaaccctggacgactcagccaacaaaaggctgagcgtaccggaaggctttctggccattgacgggattctggatctgtgtctgaatgtagtagacggcctggtagtgtatcccaaggtgattgaaaagcgtcttatggcggagctgccctttatggctacagaaaacatcatgatggatgcggtaaaagccgggggcgacagacaggagcttcacgaacgcatccgcgagctttccatggaagccggaaggaatgtgaaggcagagggaagagataataatcttctggaactcatcgcagcagatcctgccttcaaccttacactggaggagcttcagaagacaatggatccctccaaatacacaggacgggcaaaagaacaggtagacacattcctgtctaaggtgatccgtccgattctggaggagaataaggaattactgggcatgactgccgagattacggtataggacagacggagagagggaaaaaggggacgtgttcctcctggtaggaacacgtccccttttgcaccccggcctgtccccgattgaaaaggagaaggaatatgagttggaataaagaaaaaggaaatccgagagcacttttacctatcggtgtgtttcttgttatctttttgggagcaggctgtattaccggggatttttacagtatgcctgccattgtaggatttcttatagcactttttgtggcattcctgcaaaataaagaactggacttttcccagaaaattactgccatctctgcaggggtaggagaggagaacattgttaccatgagccttatctttctgtccgcaggtgctttttccggtgcggtgaaggcagccggcggggtagagagtacggtaaacctggggcttacgattatgccctccagcgttgcggtggtaggcctctttctgattggatgttttatctctatctctatgggaacttctatgggaaccattgcggccatggcacctatcggtgtgggaatcagcgagaagacaggggtttccctggccatctgtattggtgccgttgtctgcggtgctatgttcggtgataatctgtctatgatatctgacactacgattgctgccgtgaggacccagggctgcgagatgaaagacaaatttaaggagaactttctgattgtactgcctgcggcggttgtcactgcggtgctcttctttgttatttccggtgcgggaaaggctcagaaattcaccaatctggattatgattttattaaagttgtcccttacctgctggttctcatcggtgccctgattggaattaacgtttttttagtcctcataggaggaactgtactgtccctgattgtgggggtagcagccgggacgatccctctggggcagattttccaggttgtgggagagggcgttacagggatgtatgatatcacagtcatttctattgttgtagcctgcattgtctccctggtaaaggcctacgggggcattcagtatattttataccttattaaacggagaatccgggggaaaagaggaggagagctgggcattgcccttttagctcttctggtggatgcatgtactgcaaataatacggtagccatcgttatggctggacctatcgcaaaggaaataagcggagaattcgagatctctccccgaagaagcgcctccctgctggatatttttgcctctgtggggcaggggctcattccatacggagcacagctgctgtccgcggcgtctttgagcgggctgacgccttttggcattatgccgtatctgttctaccctattttgatgggaatcagcgccctgctttttattgcgtttcggcggcggtgatttctagtagcttctgtgccgctgttgacagcggcacctttttttctgtgacgatacagaaatgtctttggggtagcttttcgtgaaaggccaagggaaagagctctccactttttaattgagattgggcgaattctttcattacatagccgatgcccagattacgtatggcaaactgtacaatcatatcactggtagccagttcgaactcgggttggagtactacgttatgggaggcaagttcctgatcaataaaagaacgggtgcttgtgcttttttccaggcagatgataggcagatcttccaatgctttatagtgaaggatgcggcctttcagatgtgaaaatctgggacccgccacaaaaaggtcctgaatttctttaacggcagtgatttgaatttcttttggggcggataaaggggtactgactaccccgaaatctatcttgccctcccggaggtagcgaagcgtctcaggggtgggagcgtttgtgacacttacctttattttggggaatcgttcatgaaattgttccagataggggagaagataaaattgcagagtcatatcactggccccaatacggatttctcccatattcatattcagcatctgccttactttggcttctccggcaaggatagattcatagcccctggagacatagctgtacagaacctctccttctgcagtaagtctgactccttttggagtgcggacaaagagtcgggttcctaaaatagtctccagctgccggacgccctgactcactgccggctgggagatggaaagcttctgggcggccagagttatacttttgcattgggcaacatggtaaaagatcttatagtattccaggctgatattcacagtctctgctctcctttcggtaatgtgctcacataattcatagttatattatctataataaacattgattttacttatgtcaaatcttatagtatacttgattcgtaaaaaggcaaaataagagtacaatggattttatcaggaggatctgacatggtaaaagcagtagtgggagcaaactggggagacgagggaaaaggtaaaattacggatatgctggccaaagaatctgatattatagtaagatttcagggcggagccaatgcaggccataccattgttaataattatggaaaatttgcattacacacactgccttccggtgtattttacgatcatacaacaagcgtaattgggaatggggttgctctcaatatccctattctttttcatgagatacaggggattgtagagcggggagtacccgcccctaaaattaaagtttcggaccgggcgcagatggtaatgtcttaccacattaagttcgatgagtacgaggaggaacgtctggggggcaagtcttttggttctacaaaatcaggaattgcgcctttctattcggataaatatgcaaaaatcgggtttcaggtaagcgaactgtttgaggagtcttcactgagggaaaaggtaacccgggtctgtgagatgaaaaatgttactctggaacatctttatcacaaacctctgcttaagccggaagaggtattccaggaactaatggaatataagaacatggtagagccctatgtatgtgatgtttctctgtatctgtggaatgctatgaaagagggaaaagaaattcttctggaaggccagcttgggtcgttaaaggatccggatcacgggatttaccctatggttacctcatcctctactttagcggcctacggtgcaatcggtgccggacttcctccttatgaaataaagaaaataattacagtgtgcaaagcatactccagcgcagtgggagcgggtgcatttgtgtccgagattttcggggaagaggcagatgagctccgcagacggggaggcgacggcggcgagtatggtgccaccaccggacgtccgagacgcatgggatggtttgatgtcgtagcttccaaatatggctgcagaatgcagggaaccactgatgtagcttttacagtattggatgtgctgggatatctggaggagatccccgtatgtgtggcatacgatattgacggcagcattaccacggactttcccacaacctgtatgctggaaaaggccaagcctgtgattgaggtgcttcctgggtggaagacagacatccgcggaataaaaacctatgaagaactcccggagaactgcagaaaatatatcgaatttgtggaagaaaagataggcttcccaattaccatgatatccaatgggccgggacgtgaagatattatttacagacaaatttagcaatagattcagaagcactgcacgtgaaagacttctatgcagtgcttcttttttgatttttttgtggtatactttaacgaacaatggaagccgtgagtccgccagatgacatggatgaaaggggagtgctgcgtatactttagccgagaatggtttgaagcaagcaggcttgcagccacatgtgccaaccgggaccgtataggaaggagttgcttatgaaagtagggataatcagatgtatgcaaacagaggactactgtcctggaaccgcagattttcaggtggtaagagagaaggcgggagtatttgaaggcgttacacagctgtatccaaaagggaacccctatcggatatccctgtccatttgctaaaagaatgaaagatttgattgcaaaggatgtaggtgacagcattaagcttttagattatacacattaaaaatacatattttagaccccagggagctcttaatacatatcttgcgggcagacgtatggcgttcgttgcagatatagtttagactaccaagataacagccgcagaagtttgtactgcggctgttattataaaatatcagaggcttattttactccaaattcccggagctgggcaactgcttctcttctggaggtaaaatgaatggcgttaagaccctgtgcgcgtgcttccgcaacgttttccaaaaggtcgtccagaaataccgcatgctcaggtacaatgttaaaatcttttataagccgctgataaatcgcagggtctggcttcagcagcttgatttgataagacatataccccccgtcaacctttgacaaaaatgaaagctcatcttttgcctgtttatagagcggttctgagaaattagaaaggatataaagccgatagcccttattttttaaagagtccagccatctttctgtatatgcgtatgtatgcactgtcttaccgatgttttgaaaggtttcccgaatttgggtctcataggcgggattattttctataaaagcctgcaggagttcctcttcacttaatacgccgcgatccccttctacccagtcctcgttcaggaacaccgcctgggaaaccgcatctatggtattctcgtcatatcccagattctggagaacatccagccacccataattcacaagtaccttcccaatgtcaaaaataatagtatcgatctggtattcttccttataaaattcctgttccttctttttgctgggggtgtcctctttagggtgctgccatctgtacaccagcataaaggcatataatagaactggaataatgacagtggcatagagggacgccatcagcagcgaagaagcatcgggacggccggacagggcaaatatcagagttatgacatacatgccaaccaggagaacaactcctgtaagagcggcaattctttttatgtttttcacttttttatctccttattttaacctatgttagtattataagtattttgatagctagagtcaaccaaattcccttttggggacggtgagagaaatttaccccgaacttcatatatacaaaactatcatattccggtcttcctactgattttcatccgcctgttggtaatctggtaaaaaatattgataaaaatattgactattttatcaaaaccgttataataattctaaagaacgatgtaacacttccggcacgtatatgaataccgggaatatgtacagtaagattgtgggagaagtttatgaaggtaacagtaaaggatgttgcgaataaggcgggggtatctgtgaccagtgtatctctggttttgaacaacaggccctcaagaataactcaggagacaaaagagaggattataaaggcagcggaggaattgggatacaggcacacggccaaagaggctgctaatgagccggcaacgaagcttttaggggtgattcatcccaactgcagcaatccattctttaaccagtgtatcaaggggattgagaatcatgcggcagtgaacgggtataaggttgttctgtgcaatgtagagaattctatggagcgctgcctgggatatctggagatgctggcggatctgcgggtggaagggattatagcaatgcctcccatagatatgaatctcaatgataataatatgaaaatgggcaagttctttgagcgcaccaaaatcaggcttctgctcctggatcgggccgtagatcgtgtgttctgtgatttcataacaggggacaataagcagggggcatatctggctactgagcacttgattttgtccggccacagagatattgggattgtctcaggaccaagagaggtctataattgcagaaaaaggctggaaggatataaggaagcgctggtgtactacggaatctccattgccagggaaaatatttactacggggatttttcctccagatccgggtatcgtgcggcggaatactttgaggaacgggatgtaacggcgatctttgcctgcaatgatctgatggctctcggagtttaccagtatgccgcagagcacgggcttaagatcggagaggatctttcagtggtaggatttgacgatattccctattgtgatttgctgaaccctcctcttactaccattcagcagccggcagagctaatgggaaaacgggcttgtgagcttatgatcaaaaggatttccggggaggagcaggaaccggcaagagatacgtattttgctccgtcgctgatagaaagaaagtctgttaaggttcttttgtgacagaagaatagaaaagggccatgagggataccataaggaaaggctgaagattatttgtgaatcctctccttatggtatttttcatggctttttgcagcttgttagtccctgacgcatgactttaaaaacgcgtacaagcttgccggagaggcagcgcctgtacggacgatttggttctgataatataatttgataaaatatcgggaaagtgataaaaatagtggtaaaaataattgttttatcaatagtttaccaatacggctggaacagtttacacaaaagacatagatatacttcatgataaattaataattacccattattacccttgaaaattgtgaaattattacgaaaataaaggaaaataagattccatattgacaaaaagtgataaactgctataatgaaaatatagttaaatttatcacttttttaccaaacatttaccaaagtttatgttccccacgggaacgaaaaaaggaggaagaagtaatgaagagaaaaatgattgctatgttactgtcactggcaatggttggcagcatgctcaccggatgctccgtatccacaggttcatctgacgatgacaaaaagacagaggatgatgcaaaaggagaagagtccgctgacgcagaagacggtaccgtaacaaaatctgacccgaatatgaaagacagagaagaaatcaacttatggttctggggcgcagagccctatgcacaggaggcaatgcaaaagattctggctgataagtacaatgcttctcaggacaaatatcagctggtgattgagttcagaccttccgtagacacagatatgtccacagccctggcagcgaatcagggaccggatattgtatatggctcaggcccgtcctttgttatgcctttggtagaagccggcaaactggaagctatggacgcttacgcagaggaatacggatggaaggacagaatccttcagccatactatgaatcaggtactgtagacggcaaactgtacagcttggtaaatggtgtcagcaccatgggtgtattctataataagaaagtattagaagataacggatgggaagtacctaccaccatcgaagagctggaaagcgttatggatcaggctctggaaaaagggctttatgcatctgtaacaggaaacaaaggctggaagcctgttaacgaaaactacggttctctgttcctgacacacattgcgggaccagatactgtttacaaatgcttaacaggagaggaaaagtggaacaatcctaatgtgcaggccgctattgaaaaatcaaaagaatggtgggataaaggctatctggcaggagaagattatgtaaacttaaacttcagcgagtccttacagttattagctgacgaaaaatctccattcttcattgggccatctatcgcattccagtgggcagcctctttctttacagatgacaaagaagaaaatatcgcattcattccattcccggccacagaacaggttcctgacgagacatatactttaggtgccgcatgtactctgtcaatcaatgcaaatgtgagccaggaacacaaagatgaagctgctaaaattattgatatgatgatgcagccggaattcatgcaggaaatgacagaagcatggccaggatactggggaactcctctgaaagatttatcaactgtagataccagcaacatgggatacctttccaaatctttcgttgacgtagtacagaatatttccggtgccgtaaatgcaggaaactttggtttctacgacaatgtgttcttcccagcagcaactcagcaggcaattgtcaatatcgaagacgtatggtatgacacaatatcagtaacggattatcttgacaacatggataaagagtttgcagccgaattcgaaaaaggcctggttccgccaatcccgaaaccagcaggcattcagtaattccatcaggaaacgataaccgaggccggtatgtttgtgaacataccggccctatgtttctaaacgtttccaggacagcgcccggcggacagccaagggtgtccggtgagcgttgtcctggagagaacaggaagggcagtacataactctcagaaggagcaagagaaaacaaggaggctgaatcatgagcagaaaaaagtttaactggaattacttattaatagcgcctgcgctgctaattagtgtttccattatcctggtgccgggtattttaaccattatttcatcctttacggattggaacggcatctcccccaatatcaattttataggatttgaaaatttcaaagagctgtttcacgataagatctttttcatttccatccgaaataacgtcatatggaccgtaatgtttgtaacgatccctgtgtgtatcggtatgctggctgcaatgctgctgctgagccgcaagaaaaccagaagtatttatcaggtggcatttctgattccctacgtgctggcgccggcggtgaacgcaatgctgtggctgaacattatcttcagccctgtggttggtctggttgcctattttaaaggtctcggatttgatatcagctctcctttggccagcatgaaatcagccatctatgcctgtgccggtgtagacatctggcattactggagctatcttacggttatctatctggcggcgcttcgccagacacccaccgatcaggtggaagcagccaggatcgacggatgtaatgcctggcagctgttccggtatatctatatgccaaatattaaggcaactgtaagcctgatgtttgttatgatcgtgattggttccttcctggcctttgactatgtcaagctgttaactggaggcggcccggcacattccacagaagtgttgggtacgtatgcatattcctacgctttcagctctatgcaggtaggaaaggcagcagcggtaggtttgtttatgagcttcttcggattaatcgcatcgggaatctatgccagattaagccgcaaggaagaaatgcagtaggaggggtattatggccgttacatctaaaaagaaacgagttgcatctaattttatcatacacgcagtcctgctgattcttgtttttatctgtctgttccctatcgccctggtagtgatcaacagctttaaagagaatgcagatatcgtaaggaatcctctggccctgtcccaggtcatccatctggagaactatatacaggcatgggaaaccggtaaatttgccaaaggatttatcaacagtgtgaagctgtccggatgtaccattttaatcatcttagtctgctccacactggctggttatgtactgtcaggcaagagaattaagggaagcggcggaattcttatgtattttatgatggctatgacagtgcccatccagctgttcctgtttccgctgtactatgtgtatgcaagatttaatttaataggaaacattcccgctaccagtatgatactggcagcagtttacatgccgctgtccgtattcctgatgaggaccttctttttgaatgtcccgagggatttggaggaggcggccagaatcgacggagcaaatactgcccaggtaatctggcatgtaatgcggcctgtggtatctcccggactgatcacggtaggggtgttggtagggctgcagtcttggaatgagtatctgatctcttctaccttcctgcagggagagaagaattttactgctactctgggattcctggcaatgaacggaagctatggatctaatatgtctattttaatggcttcagcggtaatcttaatcgcacctatcgttatcttcttcttgtgtgcgcagaagtactttgtggacggtatggtaagcggagcggtaaaaggataatgatacttactaattgggaggaaagaatatatggaaataaatcgaatcaaagaggacatctacgcgggtgtattgggaaagatgataggagtctatctgggacgtcccgtggagggctggacctatgaaaaaatccagaagtactttggagagatctactattataagaatcataagacaggagcgcccctgattgtaccagatgatgatatttcgggaaccttcgcgtttttcagaagtttggaagataacggctatgatcctgaactcacggcggaagccatcggcgatacctggctgaattacattatagagaaccaaaccattctctggtggggaggtcttgccaggagtacagaacataccgcatatctccggctgaaaaacggaataaaagcccctaaaagcggttcagtggaattaaacgggagaagcatggccgaacagattggctcagagatctttattgacacctgggcgctggcaaatcccgggaatcctgagcgcacggcaagaatggcaaaggctgcagccagtgtaagccacgggggagttgccattgacgcagcagtttatctggcggtgatggaatccatggcattcgaggagaagaacatagacgcgctgctggatggcgcaatggagtatgtggacaaccaggagtttaaagacctggtacaggaactgcgtgcccagtgcgcaggtacagatgactggcatcaggtgcgccggtggattgcagacaatcacggatacgagaaatatccggggaattgccctatgattaccaatcatctggttgtcttaatggctctgcttatgggaggagatgacttccacaaatcctgcatgattgcctgcagttccggatgggacacggactgcaattccggcaatgtaggctgcctgaacgggatccgtctggggctcgagggatttcagaaaggaaacgacctgagaaaggcagtggcagatcggatgtatattgtaaccagtgacggcggttcctgcatctccgatgctgttttggaaacacgtaagattgtaaaggcagcggctgcactgaacggagaagaggtttgtctgcccggggaaaggatggcatttgaatatccgggttccgtgcagggtattatcccttatgacaaggaaacggaagaacaggtgctcaccagaattgagaatacctttgattctaccggagaatacggatgcaggctctcttacgagagactgggtgcaggggtgcatgcctctgcctgcgtggatacttttgtggatttgaaaccaaaggggaaggacggcaccagctattttgatgtgctgtgttcgcctactctgtacagcggccagacggttaccgcctgcgtaaaggctgaggacgcacagaatcctgatttcaggttttttatagaatattttaatgaagaagatgaactggaggtgcttaagagccccgtgtttgcactggaaaggggagagaaccttctgacctgggaagtgccggatacagagggacatgccatctaccgtttgggtattgctctgaccagtcagacgtgtgtggacggaagtattattctgaaaacgctggactggtccaatgttccggtacgctatactatggggcgttccatggagatgacgccgtccctgactccgtggacaacgaagacctcctggctggctacctttgtatcctctgcggactgctattgtccggattacacaaccaccttttctatctctcacagcggtcataacggagtggtaactacgggaaccctggactgggataattactctgtgagctctgccctgactctgggacagcaggaggctgcaggacttgtggcaagagcaaaaggccacagaagatattacggtgcggtgctcaccaacggacaggcagtaatctatcggcagaaagacggggagaggattaccgttgcaagtgaaagctttgactttgaatcaggcgtggatcacatttataatatgaaattcactgtgaataaggatacccttaccctgtatgtagacgggaaggcggcagtatctgggcaggatgaagcttatacctgcgggggcgccggatttgtggtggattacggtgcgattttagcagacagatttgagataataagagtaaaaggagaatagaaatggctgttacccaattcagaaaccagatctactcaggtgttctgggcaagcttattggtgtatacctggggcgcccggtagaaggctggagttacgaaaagattcaggataccttcggggatattaaatattatgtacacgaggaagtgggagttcccctgattgtagcggatgacgatatatcaggaacctttggatttttccgggccctggaggataacggttatgacaagcatcttccggcaaaggcatttggagatacctggctgaactatattattgaaaataaaacaattctctggtggggaggtcttggccgctccacagagcatacggcatatctgaacctgaaaaacggcatggaggctccccagagcggttccatagagacaaacgggaaaacgctggcagagcagatcggagcacagatcttcatcgatgccatcgccatggcctgcccggataatccggatcttgcggtggagctggtgaaaaaagctgccagtgtcagccatgacgggattgcagtagaggctgcctgccatctggcagctctggaagctatggcgttcacggaaaaggatctgaatgttttgctggatcgggcagaaacgtacctgtctaatgaacagcttatcgctattatccgcgatgtgcgggagatctgcagcagggaatcagactggagagctgtgcgggagtatctgaaccccaaatatggctatgaagttttccccggctgctgtcatatggtgcctaatcatgccatggtgattgcctctatccttctgggaggagacgatttccagaaatccatcagcattgcctcctccgcggcctgggatacggactgcaatgcgggtaatgtaggggcatttaacggaatccggctggggcttgccggcatcaacgcaggggctgatttcagaacaccagtggcagatcttatgtatgtagtgacctccgacggcggatctgtggtgaccgatgcagtgattgaaagcaagagaattctgaaagctgcagctatgctggcaggggaggaagctgagatttcctctgagaggtttacctttgaattccccggctctcttcagggatttgccccctgtacctttgcccatggggccatggcacaggtggagctatccaattacaatgaatttactgagggaaggaacggactggttatcgggtgcaggcatgtggccgatggggtgacagcggatgtatccacccagacttttattgacttttcaaagttggcggccaacttctctacggtggcctctcccaccttgtattcctctcagaaggtggttacctctgtaagccttatggaagagggtgaggtaagtcttcgtccgtatatattatactatgacattgataatgtggagcaggtgatctacggagaacccgtggttgtcacaaaagcagtgaatactttttcctggacagttccggatactcagggaatgtctatctttaagctgggatatgagatttccagcgaaaagcggtttgacgggcacgtgattcttcactccattgattggaagggcgctccgtccaggtttgcccagcggggaatgcttatgacctccatctggaatacgaatcccctgtggctggctgggtttgcaagctctgccgtacagtttgccgcagactttaagtatacgtactgtgtctcaaacgtggaagatgacggcctggtgactattggaagccgggagtgggaggactatacggcagcatccacccttcattttgccctgcaccagtccggcggactggtagtcagaagtgtgggacaccgccgctattacggggctgtgcttcagaacaaaaaagaagcggttatctatatgcagaaggacggtcagagaaccatactgggcaccgcgccttatgcctacgaagaggatctggggtatgagttaaaattctctgcccataaaaatcagctgtctctcagtgtgaacaatgagacgatccttactgctgaggacgatacctatacctgcggcggggcaggctttgtgatatcaaggggaaccatgacctgtgacagcctgattatctcagagtagggggtgcagatgtggattatatagttgcatcaactgcagtgacagacgagattcgcttttcagatggaaaaacagtggaaaaggtggccggaggtgccggaatctacgccctgtgcggtatgaagctgtggagtgacagcgttcttctggcgacgggggtaggggccgattaccgggagatctacggagaatggtatgaaacaaacgggatctccatggaggggcttcttgtaaaagatgagaaaacccctcataccgtcatccagtactttgaagacggagaacggaccgagactcctctgtacggaccagaccactacaaaaaaatagaaattacccctgaggatctgaaaccctatttttctgcttccaaaggaatctatatttttaaaaacgacagcccggatttctgggagaagattttggagatgaagaaggaatcttccgcggtggtaatgtgggaaatcgccaatgacgccacctgcctggagaaaaagaagcatgtcagggagatcgcatcccgcctggatatactgtcaattaatatgacagaagccagggcgcttctcggcctggagaagaaggaagatattatacaggaatttcagtcctggaatctgaggcttgtatttctgcgtcagggagccaggggagctgtcatgattaccccgaaagaggctgtggaagtaccttcctgccagggggtaaaggtaatggatcccacaggcggaggcaacagctcctcgggagctgtcttatgtggatactgccagggacattccccggcagaatgtggaagaatgggcagtatttctgccgcaatgtgtatatctcagtacggagtgcctaaaagaatacaaaaagaggaacaagaagaagcactccgtctattaaaatccatggaggatcagacatgttaagtgatgaaatgcgaaaaaaaccatctattcagcggatgcataagcagtatgagtattataaaaatgtaccggaaaagggtttggtgataaaggggcgtcccgcgcttacccagatcgatcatacaaaggtaggagactttgttttgattaccgtaagggatcctctgtgtgcctatgatgaggacccggctaagaaaattgcagaccgtctggagaatgcggagctaattggcaattccggaatgtttactacatattccggcacatacaaaggagcccggataactgttgtaagcgggggaagcggttctccggagatggaattaattctctatgatttcatggaatatacagatgcctccacctttctcagagtcggaggttccggaggcctgggagaccaggtacatcccggtgatgtggtgattgccagcggcgtggtgcgggaagaaggtatgacaaaggcatatattcccgctgcctacccggccgccagtcactatgaggtaattaatgctatggcggctgcggcggaggagttaaaagctccctaccatgtgggcgttaccctttctgtggacagtgattttgtgggtggcggccggccgggtgtgggaggatacctacagccgtggaacatagaaactgccgggatttacaaccgtgccggggtgcttaacggggacagagaatctgctgctattgttaccctgtcggcattatttggccgcagaggcggatctgtttgttccgtggcagataacctttgcacgggggagaccttctctgaaggggcagggcataattatgccattgatattgcgctggagggatgtgcagtgctccagcagatggatgagaaaaagagagctgccgggaagaaaaactggaatcccacgctgtggtaacaggacacaaagaaacagactgtttggaagatataagggagaaacttatgagtaaatatgacaatccaatgagccgtcaggtattcagcctgccggatctgattgagacacaatacgacgatttagaagaaaaagcgaggcttgttctgagcttccaggagatattcaatatccagagaattgtactcacaggatgtggtgactcctatgcggcatctctggccgccaaaccgatctttgagatgctcacaggaattcccacagaggtggtgacagccattgatctgagccgctattactgtgaaaaacatatgggggttgactgcagaaatcccctggtaattgcggtgagcaattccggaacaggagccagggttgcagaggccgtacagcgcgccaggctccatggctgttatgtgctgggagtcacaggaaatgagaaatcccctctcggcatgcattccgacaaaatcttaaaactaaacatcccggaatttgagggtgcgccgggaaccagaagctatatggtaagtgtgatgtcccttcttcttttggccatccgctttggagaggtgaggggcagctataccatggaccaggctatggactatcgttttgacatgagggcacagggagaggcactgagaaagcttctgcctcagatggaaagcacttgtgtgaaggcagctgaggagtggaaggactttccctactatgactttgtgggagccggattcgactatgctgctgcgtggtttggctgggccaagatgctggaggccacaggaaaggtggctatgcatataaattcagaggaatggttccatctcaacttctttgcaagggatgccagaaatctgggaaccgttgtggtgggcaatacgacgaatccaggcctgagcagaaccaaagagatggtacactatgccaatgtcctgaaacgtccgcttcttgttgttacggatggaaccaaggaggatttcaatggagaagagggaacttatgtacaagtgcccgctcccaaatatcccctgaatatgcctctgacccagtttgcgcctgtctgcctgctggccggttatatctcagagatgataggtgagaagtacggccggggctgcgagggggactggtcctttgcagaaggaggagcaggagtgaaaaacagcgagattattgtgaaatagggggaagacaaatgcttaagaattataaattggagacagtatacaacggggttcatgatattacagaacagttgattcaggcggtagaggagagcggcgtgcaggagggtacttgtctggtatacaatcctcattcaacggcagggctggctgtattttccccctgggatccggatgggtttgtggatctggacgaggaaattcgaaggctggttcccacaagaattgactttaaacaccagcacgataccccgcaggatgctgcgggacatattaagtctgctctcttgggggtatctgacggatttatcattcacgaaggaaaaccgcttatcggcggctcccagcatctgtattttctggaattcgacggccccagaaagagagagttttttataaaaatacagccagatgtatagaactggtacaggaaaaagaagaaaacagccgcttgtgcgtctgtaaaatgaataaataaagaaagaggtgcggtatgaaaaagattatattagactgcgatccaggtatggacgattccatggcaattgtaatggcggcaaaatctccggatctgcagctcatggcggtaactacagttaacggcaactacccggttgatgtcacctgcgtaaatgccagaaaaacactggaattgcttgggcgtacagacattcctgtggcaagaggactggcaaagcctattatcagagaatgcccgaaggatccttttacccacggaaccgacggacaggcagagaatcaccttccggcaccggctatgccgctgagcgaacttgacgctgtagatcttatgataaagattataaaagagaacccgaatgaagtgtacatcatttccacagcgccaatgagcaatatcgcgcttgctatgataaaggcaccggagatcaaggagatgataccggcgatctatgcaatctccggttcgttcggattgaataagtatgcattcttaaacgctacgggggacacaccccagagtgagtggaatgtatacgttgatcccgaggcggcggacctggtgtataattcaggcgtaaaattagtagctctgggactggacgtagctacccattttgatgtggacttcagcgatgatgacctcaaaaaaatggaagagagtgataaaaaagaggcaaagtttcttctcaatgccatccattttatccggaacagaggatttgacgcctactgtacagtgatagactgtatggcggttgcctatgctattgatcctactcttgtagaaaccatggaggctcatgtaggggtagagacaaaagacggactcacactgggaatgacagtaattgacagacgccaccattttgtatgggagcacctgcctttgatccaggtaggctgtaaggcagactgcggaaggttcctgcagcttttgctggaactggtactgaaataggaggagactatgcatcagtatgaaatgtttaatggggaggcaatctatattgccggacctgagtgcttttatgtaaatggatacgattcccttggggcgatgcggaaagagtctgagtattatgggtttgaggttacccttccaaacgataatcctctgaatctggaacatgaggatctgagaaagaatgcagatgagatttttgagaactgcgccaaaagtatgaatgcatcaaccgtgattatagccgatctggagacctttcgggggtgtgaaccggacggaggcagtatctacgagatcggcatggcctatgccagggggatccgctgctacggatacaccagagatttgagaaatatggttcacaaataccctctcgcggtactcaaagacggggtggtatatgaccacgacggcagagtgcttccttaccaggaccttcccttctccccctgtgtgatggcttcctgcagggtaattgagggcgattatagtgactgtctgaagcagctgaggctggacatacacgaggagcagaaggagtctgtgatccgcagcaggaaaaaagaagcctttgtacccggccccaccctggaaaagcaggaaaaaccagtggtttatcttgccggaccggagcgctatgacagtgacgctgagcttctgtacgaaaaaagaaaggccctctgtgagtcctatggacttcaggtgtttacccctgcagatgacgctcctggtgtggagaggattaccagcagggatccttatcttcaggcctacaatgattttgaccgctggcagcagcatgtgcgcaactgtgacatcatcctggcaaatctaaatgatttccatggctgggagcctaacagcgatacctcttttgagtgcggcatggcctggcagctgggcaagcgatgcttcggctatatggacagtacagaaattatgagaagacggattcctcattatggggaagataagaataacaaagatatctatggaaatgatgtagagaattttaactatccaatcaacctgatgttctcctcatccatgcctattctggaggggaattttgaacaggctttggaacagatggcagaacagctgaaaaaggagggaatcttatgagtacaccccataacgcagccaaccccggagacattgcagacaaggtccttctcccgggagatcccctgagagcaaaatttattgccgagaattttctggaaaaccctgtctgctacaatgaagtaagaggcatgtatggttttactggaacctataagggaaaaaaggtttctgtgcagggcactggtatgggaatgccgtccatgtctatttatgccaatgaattgatggagttttacggtgcaaagcgtctgattcgagtgggcacttgcggaagcattcatccggaaattaaattaaaagatgtggtaattgctttgggagcctgcaccgattctaatatgaatcatgaccgtttcggaaccatttcctttgcgccaacagccagcttttcccttttagacgcagcctatcaactggcagtaaaagaagggatgccggcagtggtaagaaatgtattcaccagtgataagttttacgatgacaggattaaggaaaagacacagctgatggcagattatggtgtggcggctgtggatatggagacttgcgaactgtattcactggcggcaaaacatggagtagaggcgctgacgctgatgacagtaagcgactccctggtgacaggggaggcctgcacgccggaagagagacagactacatttcaggatatgatgaagattgcgctggagattatataaatactgcagatgacgttagataacagatagggtgtatccggtcccgtacccaggatgaacgatgagctgatacaacgggccggccggcttttgactgcatacagtcaggatattatgagaaaattaaaatagtactaagaaatgcctcttatccggttcgtaaccggtaagaggcatttataactctaaaatctcttgttcttgttttttacccagactgtcaacgaccatattccggcaattagcccataaaaaattccaaagcagagtaccccatagcagacattggccagagactggcttctcatgacgccaacctcaatctgattgcctgcaagaacaaagatactcacaaggatcaaaagcagggcaaacaaagcattctgatacgccatgttcagccgcttacggatactgacgaaaagcacaaggaatcccagggtaagaatgcctccgagtaaagaaaccggaatttcggctccgctgccatgtcctccccgtcccaggagaatcccggaaccaaacataagaatgacagcgccggcggagaaggcattttctctggatctgaccttcaccccctgatacctggaatccagtaccccatatattttttcataagctcctctggggggcttctggaacctggaaatatgaaaggctttgtcgtggagcttccatatcggacgtttcatctgcctgcatcctgagagaaaatctgcataggcgtccaggaatacctgagtatccttcagacggaggaactgtgcgctgttcaggaattcattccaggcttttatattggatctggtacgtgcatcctctatgagggagcgtgcttctgaaaccagagcttctgcggcctctgccgtctgccgaaggcgctgaaacttttcctgttcaaaaagctgctcatagttatacatatccccggtgtcttcctctgaggaatctgccggctcatctgcagggtataggaaggagggcactctgtcagaagatgcatctccgcctgcagctccaggatgatataagccggatgacgcaggggaagatcctcctgagcggtgtggattacggggagcagatgcagaaggggcatggccggttgcaggagcggacggcgggatatttcctgatttcgcgattttgagagcctccccgtaggcttcgtgcagtctctggaattcctcaggaaattcttccgggtgatagacagcggccagcctggcataggctttttttatctgccgtacatcagtggtaggcaggatttccagaatatcaaacgggtttgtcaatcttcatcctcctcgtacctatcctcttcataataatacaggaagggatcttctgattccagagcatccagggtatctttcagctgctgctgtgcctcctgctgctgcctgcgggacccgtgctccagcatccactggaactgagttaaggctttgcggacatattccctccgttcctgcacacattccacatagaggcgttcgcctctggccatcagcatcttattctctgcctgatcctggggagctgattttaatttttccaattctttcattctggcttctatctgcgtgtcgctcatataactgtctttgggaatgacctctttctgtacatgcatttgggtcatgggcacgaatgcctctgtctggagtattccattgatatcatacgtaaagcggacttcaatgggtacggcgccctgctttcttataggaagagagatcttcagctctgatagtttccggttatccctggcatagtaggagtccccctgatatatattgaattttacaaagctctggaagtcccgcgcagtaaaaaaggtcttcttttttgagcagggaagggtagaattccgctctattaccggttcaaaaagaggttctgacgggttttgctcattgaccacatcggtgccgattgagaagggacagatatcggtgagcaaaagttcttttatgccttcctccctggacttcatagctgccgcaagagcacagcctttggccactgtttcatcacagcggatgtctacaatgggccggcgcccgaataaatgctccagataaccctgtaccacaggcattttactagagccgcctaccattattacctgactgatttcttccagagtataattgctgtcaacaatggcccgcctgaggacctcctgcatccgaagaaatataggaccgctgatatctagaagcttttggcaagtatatgaggagctatagtctgagccatgcagatgcaggctcatctgtgcttcctcctgctctgtcagcttgtgtttgcacaggagagcctgcttttgcagcagggccttggactgtgggtccagcttatccgcagacaggtgatgctcggcacaaaagttttctgagagaagaccctgaaagtcatctccccccaaatgattgtctccggaaacagaaagaatttctataatattttcaaaactatctacaattgagacatccagtgtacccccgccgaagtcaaataccagaaatacggcgtcttccattccctgctggaagcgagcccacagggcggcagcgcttggttcgttgataatgcgttccacccgtattccggccagggctccggcccttttcgtggctaccctctgttcatctgtgaaataggcggggacactgataactgcctcctccacaggctctcccagataggactgtgcatcagctaaaagctggcggatgacaaaggcgctgagttcttccgggagatatttttttcctcccagacagcatacttccttctgtcccatgagccgtttaaaactaaaagcagtggcttttgggtgggtgatcaggcgctctctggcaatctggcctacgagtatctttccttcctcgtccacagagaccacagaaggagtcagtgttttatgaaattgattggggattaggatacattccccatccttatagacgctaatcagagaattggtggttcccagatcaattcccacaatggccatagaataacctccctgttatgtatgatccaggcttccctgccgtgattgtgcatgaggggagccttacacatacattttactacattatcttacaggttgtaaatgaaagccagcaattggattcccatagaaagtctgctataatcagagaaacaacgtaaaaccataccataccggagggaatgcaagatgatttattttaactgtgattataatgagggggcgcatccggctatcttggagatgctggagaaaaccaattgggaacagactataggatacggcatggatccctactgtgaaaaggcaagagagcttatccgcagggagtgccgcgcaccggaggctgacgttcactttctggtagggggcacgcagaccaataccacagctgtttcttctgtgctcaggcctcatcagggagtgatcagcgcagagagcggtcatatccaggcgcatgagactggtgccattgaggcctgcggccacagggtgataaccgttccgtcaaaagacggaaaaataacggcagagcagattcacaggatctggaccggccattgggaagacagcaatcacgagcatatggttcagcctaagatggtatatctgtcacatccgacagaatcgggaacgctttattctttagaggaactggaggctgtcagcaatatctgccgggcgtgcgggatgtatctttatctggacggagccagactgggctacggcatctgcgccagggacagcaccgtgagccttccggatatttccagattatgtgatatcttttatatcgggggaaccaagcagggggcactgtttggagaggccttagtaataaccaatactgatttgaaaccggatttccgttattttatcaaacaaaagggcgggatgctggcaaaaggaagactgctggggctccagtttattgcattatttgaggatggaatctactatcagattgcggagcatgcggacagaatggcggactgtatccgggaagcctgtgtcagaaaaaggattccgttcctgtttgagacaaaagcaaatcagctttttccggttttgactcattctcaggttaaaaagctggaaaaagaatttgtactttccctgtgggaaaaactggagggagacagatacgggatgcggatctgtaccagctgggctacaacagaagaacaggttcaggcactaactgtggcaattgataagctgtaatatctgctttaatttaaagatattcccatcccggggaatatctttttttgattctgcgtaccatgataaatagcaggaggagaagagatatgaatagagtaatcatcgcagggggcggatggtcaggatgtgcggcggctgttcaggctaagaaagaaggagtggatgtaactctcctggaacgcacagacatgcttctgggaaccggactggtgggggggatcatgcgcaataatggaagatttactgccgctgaggaaatgattgccatgggagggggtgaacttttccaggtgattgaagagaacctgaagcacaaaaatattagttttccaggccatgaacacggggacttatatgatatcgggcagatatcgggagctgtatcccgttttctgaaagatatggggattcatatttataccaaaagcagagttcttcatgcagagatgaaggacaggcggatgataaacgttacggatactgaagggaattgctacagcggggacggatttgtggatgcaacgggaactgccgggccaatgaacaattgcagtaaatacggtaatggctgtgctatgtgcattcttcgctgcccaagttttggagggagagtatcgcttaccagtctggccggagtgcaggagaaaatgggtagaaggccaggaggggctgtgggatctatgagcggttcctgtaagctttataaagaatccctgtctttggagatacaggaacttcttgaaagagatggggtggctgttgtgcccgttcccccagaactggtagaagatcatcttgagaaaaaatcctgccagcagtacgcactgccggagtttcgggaaaacctggtaatattggatacagggcatggaaagctgatgacgccttactttcctctggaaaaactgcaaaaaatcccggggtttgaaaacgccaggtttgaagatccttatgcagggggaaaaggaaattcgatgcgctactttgccatggctcccagggacaatacactgaaggtagagggggttgacaatctctactgcgcaggggaaaaggcaggccttcttgttggacatacagaggccatcgtaacaggcgttctggcgggacataactgtgcgaggaggatacaggggaagcagcaaatcacactgccggatacgctggcaatcggagatatgatttcttttgtaaaacaggaaatggaaacccccgaggggatggaaagaaaatatacattttccggctcctgttatttccagaggatgaaagataaagggctttataccacagatacgtctttgattcaaaaacaggtagaggaggccggactctccgggtatttttcccacagcggaaaaaaggattgtgtttcctgaaaccttatcatataatcaagaaaaagatatgggaggagagacagtatggaaccaaaggtaatagtagtagattataaagataaccccatgggagagatgaacaaaagcgaggcccacgcatcaccgaatcttcaccgggcattttccgtcttcctgcacaaagacggcagagtcctgctgcagaaaagggcaaaagacaaatatcactgcgggggactgtggaccaatacctgctgctctcatccccgtccaggcgaagaaaccttggaagccgccaggcgcagactttgggaggaaatgaaaatcacagcaggggatttggaggagatccattcctttgtatactattacagctttccttacggagtgacagagtttgaatacgatcatgtaataatcggggaatacagaggaacttttgagttgaatcccgaggaggcagaagaggcagcgtgggtggagaaagaagaacttctgcaggatatgagggagaatccacagaagtatacgccgtggtttctgatttgtgctccggaagtagtaaagagaatataaaaggggacagggcagttcgagtttgggacaccccgaacctattttgggacgtgttctttttagaaagaacacgtcccctttttacgtttatcctctggttggcgttaatcccgtatcaataaaatagtgatacagaagatctgcctggtgggagatatccccatgcttcagctttacgatcccgatggtagttgtcattgcctcctcgaatggtatacattccagattgggaaagagttctgtattcaccatatctttgggaagtatggtgaatccgagccctgcgtcaaccatattcaaaagataaaggtgccttgaagtggtaaaggcaatgttaggctgaaaccctgccctggcgaactgatccaggcagaggtggtaaatatcggactcatgactcagtacaacaaacggagactctctgagctctttgagcgtcaggggatgcccttttagtttttgcccattttttttggagcagacaagagtgaatttgtcttcctgaatggggcagtactggtattgctctgaaacaagataattcagccgcaggatggaaagatcgatttttccgttatccagcagtttgagaagttccgattggtttgcctcggtaatgtttatctgtatggtatgcatggcgtcctgaaaagtggcaagctgctgggcaatatgataatcctgcatcagcgggagagtcccgaagtagacggtctctgaagccgcatctttctgcagataggacatttttgtcatcaattctgtgtatgtacggttaaatttctgtgcgtattttaaaaagatttctcccgccggtgtcagagaaactttattattggagcggacaaacagctccaatcctatttccgcctccaaagccttaatctgttttgacaaagatgactgagaaatatacatctcatcagcggcggcagagaatcccccgaattccaaaattgctaaaaaatccttaacctgagcaatcgtcatctttcattcccccattctttctatatatgtataggtgttatacatatatcttatcctttctattttacagctttccctgaaaatttccactgctttttgttattttaagtgattatttctatttattgtctaattaggcaattccgttttggaatggccaggtgatgaaagtgaattgtgcacaaaaacctcaagtgatatactaagtgtgtcgtcaaaagagtaaaaaagtgcactatgaaaaagcataaaaataaaaagtgcacaaaaaataggtaaaaggaggaattgaagtggctaaagtttacaaggatttaaggagttttttagagactctggaagaagaaggacagttagtccgtatcaaagatgaggttatgccggagccggatatcgcttctgctggccgtgcagccgctaacatcaagaatggtcctgcagttttatttgaaaaggtaaacggttacaaatattccgtagtgacaaacgttcatggttcctgggcgaatcatgcgttaatgttaggtatgccaaaggatactcccacaaaggagcagttctttgaactgaaccgcagatgggataagttcccggtagaacctaatattgtttccagagaagaagctccctgtaaagaaaacgtagtggataaggacatcaatctgttcgagattcttccgctctacagaattaatgaccaggactccggatttttcctttccaaagcatctgttgttacagcagatccggaagaaccaggcaactttgacaagatgaatgtaggtacataccgtatccaggtaaaagataaggatcgcgtgggaatccaggcattggcattccatgatatcgcagttcagctggaaaaggctgaaaggaagaatgaaaaacttccaatcgccattacacttggaaacagcccattagttacattcatggcctccacaccgattggatatacccagaatgagtatgaatttgtgggcgctctgcaggacggggttcctacagatattgttaagtcagatttatatgatcatctgtacgttccggctggatcagaagtggttctggaaggatatattgagccgcgcgtgcgtgaagtagaaggccccttcggagaattcccgggctcctattccggctgccgtcagcagtgtgtagtgcgtattgagagagttacccacaggacaaatcctattttcgaaaatctgtatctgggaattccttggacagagattgattacctgatggctttgaatacatccgtacctctgtacaaacagattaaagaaagtatccctgaggttgtagctgtaaatgctatgtatacccacggcatgggggttattatttccacaaaatgccgttacggcggatacggaaaaggcgttgctttccgtctcttgtccacacctcatggaatgccttactccaaggttgtaatcgtagtagatgaatttgtagatccatttaatttggagcaggtaatgtgggcattgaccacaagagtaaaaccagataaagatgtggctattattcctaactgcccgggtatgcctctggatccatcctccgtaccggcaggtatgcatacgaagatgatcatagatgcaacaactccggtagctccggagccgaatccaagagaagtagaacttctggagccgcctgcaaagacagaagaatgggaaaaaattatccgcagcatgtttaaataataaggaggtaatggaacatgaagtgtccgcgttgtgatagtgataaagtaagaaaaatggttgactctcccgtaggaaatgcctgggaagtgtatttatgtgataagtgctactactcctggagatctacagagacaccgcacattcatgataaatttaaactggacgatgaaaagatcgctcatatgcaggttattccacctgtaccaccattagataaataaaacctgagcaaaagaatccccgtgccggaccagactgcatggcccggcatgaggattcataataagagcaaagaggggtaacagcgaatgaataagaaaagaataggtttttttctaggtattgcagttgcggtaattatttattttcttcccttaaagggaattgaaccggcaggtcagacctgcttggccttaacacttatgaccgttgtctggtgggcaactcaggttgcacagtccggatatgtaggcggtatctatttaatggcactggtaatatttaaagtagcggagccggctctcgtattcaaatcctggatcggtcctaccatgtttttgattatcggtgcatatttgattgcaggtgcggtaaaggactccggactgggagagagaatcgcatacgcatttattaacaaatttgtaagatcttataaaggtattattgtttctatctttgtacttacctttattatgagtgttttgattccccatccatggcccagagcatttctgattatgtctgtaatggcagtagtaattcagagtgccaaaatgccaaaagaggatgcagtaaaaatcggatttaccgtattcgcagcatctgtaccggtatctctgatcttcctgaccggcgacagtaccatcaaccccctggcagtagccaactccggagaatctctgggatggcttggctggtttaaggtaatgggtgttccggccattgtagcgtcaatactcacgttgattttaatccttattctgtttaaaccgacaaaagaggtacatataaatctggatgaaatccatgaaaaacaaaaagctttaggtcctctctccgcactggaaaagagaactgccgtatggcttgtaattgccatcgtattatgggcaaccgactctatccatggcattaatatcggctggatcacgctgggtgttgccatgtgtatgagtatgcctgttgttggagaggttctgactccaaaatcctggggacaggtacctgtgcatgtattaatcttcctgacatctgccatggctatcggcagtgtgggcggtgaaactggaatgaacgcatggctggcagacacaatcctgccttctaccgttccctctaacctgtttgtacttgcagcatttattgcggttatttctattgttatccatatgttcatgggttctgttatcgctgttatgggtgttgcgattcccgcgcttatggcatttacatcacccatgggcatcagccccctggcaaccgcactgtttgtatacacagcagtagccagccactatatccttccgttccaccacctgaatatgctggtaggacagggagaggaaaatggaaagtatacgcagaaagaatgtattcgtctgggtatcccattaatagcagttgtatttattgtaacagttttgatagaagttccctggtggaagattatcggtctgttataattagagaagtattcaagtatatgtttcgcaggccggagacagtattacagcctctggtctgcaagtaaaagataaaggcggtaaaaacatgagaataatcgtaggcgtaaccggcgcttccggggttgagatgagttattacctggtaagggcgttaaaaaacatcgaaggctgtgaggtacaccttattatgaccgctggggcaaagaagacctgggagttagaatgcgatattcccctggaggacctgatttctctggcagatgtagttcacgaggataaaaaccttgcggctgccgtatccagcggttcttatgtgacagacggtatgataattatgccctgcagcatgaaaacattggccggtatcacagcaggatatgcagagaatttgatggttcgggccgctgatgtttgtatgaaggaagggcgaaaagtagtgctggttcccagagagatgccttttagcagactgcatctcagaaatctgaaggaggcagcagagcttgggtgtgttattgtcccccccatgctgactttttacaatggaccgaaaacactggaggatcagattaaccacattgtggggaaggtactgatgcagtttgggataacccatgataaatttgtaccctggacaggagcggatgaataatgaagacatttcatgtgatgacggctgagggcagcagatatcagacagaagcttgggccgtatcctgcggagaggatctcagtgtcactatatgcgggggttcccggtaccatgtgggagccactgctctgggatgtgcccggcctctgtatgagggaaagcccagacgctctgcaacagtaagtgtgctctgcgcttttgaacataaagatgatgaagtggccagatgggcggccagatacctggctacagaacttgactgcagggtatccgtggcagccggagtacatattgatgaggctgcggcagaggagctccagatcctgatggataacagccgggaagtttgtgataaaataattgctgcagtaaaagaagcgaaccgttaaaggaggttttaaaatggcaaaaatagaagatttacgttccgctttggaatacttaaaagaaattgacggacagttggtagagacagatgtagaagtagatccccgtgcagaactctcaggagtgtaccgttatgtgggggcaggcggaactgttgcaagacctacacaggaaggtcctgccatggtatttaacaaggtaaaaggacatgaggacgcaagagtagccatcggactattggcaagcagaaaaagagttggttatctgctcaacgaaaaaccagagcgtctgggctttctgttaaatgaggcagtttctgcacccatagcaccggtagtcgttgacaacaaagaggctaaatgccaggaagtggttcattatgcagatgagccgggattcgatatccgcaaattaattcctgctcctaccaatactgaggaagacgcaggaccctatattaccatgggactttgctatgcgtcagaccctgagacgaaagagtctgatattaccattcaccgtctctgtctgcagagcaaagatgaaatttccatgtattttgtgccaggtgcccgtcatctgggagtatttcgtgaaaaagcagaggcgatgggcaaaccgctgcctatctctatcagcgtaggggtagatccggccattgaaattgctgcctgcttcgagcctcccacaacccctctgggatataatgaattaggcgcagccggggctatccgcaaggaagctgtaaagctaaccaactgtctgaccatcgatgagagatgcattgccaatgcagagtatgtcatcgagggagaactgctcccagatgtacgggtgagagaggatgtccagtcagataccggaaaagcaatgcctgaattccctggatatacaggtgcagccaatccatctgttccaatcattaaggtaaaagccgtaaccacaagaaagaatcccattatgcagtcctgtatcgggccaagcgaggagcatgtaagcatggccggtattcctaccgaagccagtattatttccatggtagaacgtgcgatgcccggaaaacttcagaatgtatactgtgcttccagcggcggcggaaaatatatggcagtgatgcagtttaagaaggcagttccctctgacgaaggaagacagcgtcaggcagcgcttctggctttctctgcattcagtgaattgaaacatgtattcctggtagacgaagatgtagattgtttcgatatcaaagatgtagtctgggcaatgaatactcgtttccaggcagatgtagacctgattccgattcctggagtccgctgccatcctctggatccctccaatgatcctgccatgtcaccatccatcagggatcatggaattgcctgcaaagctatttttgactgtacagtgccattttcagagaaagacaggttccaccgttcaaaatttaaagaactggatcctgcacattgggttcctgaactatttaaataagaagaaaagcgtcccacttcatttgatgaggtgggacgcttttttctcttcctgtttaaggctaatttcaggaagctcctgtatgatagatacgataataaggaagtattccagaatgacacatgtaaaaggagcaggtaatgaggacaaagatatcaggcaaatggaaggaattgagtgttcaaaaaaggatcgtctgcatcaccagtgtcactgcggtatgtatggcgctcgttgtaatcacaggaatctctgtgtataaaaagcatggggggacggcagaaacagccggccggcagcggacagaaacggaaataccccagtcagagggggtgagcggcagcggatatgtggcatacggcacagttgtacaggaatttacgctccccttgacagacgaggagactgctgcccccctggtggtggaggaggtctgcgtgagtgcgcaggatacagtcacagagggggatcaaatcttaaaggtcacaaaggaaagtctggaacaggcggagaaattccttgagaagacagtaaagaatgctgagaatgctctcgttactgaaagactggaatacacaaaagctaagatggaggcagaatatacttacatatcagaggcaggcttgaacgagactgcgaaagctgaatatgagagccaaatcgctgctttggaagaaaaagtgagcagtgcccagtctgcactggaagaagcgtatctcacggtcaatgataatcccgattccattgctgaaaaagaaaatcagattgcctctctcaacagccagagcagcgaggcagaagcgcagctgtcccagacacagggagaattgtcttctgtgaaggaagtttacgaacagaaaaagtctggatatgaaacagccctggaagaactcagagcgattgcgattgtctaccggtatctgggttcttacaggggaaaagataccctggagctggatgcagttctgacagagatatccaaagaggcagcagagttagcaggtagttccgggggtactcaggctgcccaggcgttctccgtcagtgcaccggcagccgaacagagtgccgcatccggaagccgtgaagcagaagaggctgtcagtgaagccgggacagccagtgaagtagatactctgctggaaagcttgcagggacagtacagcacggcaaaaagtacctatgaggagtgtaagaatgcatacaaggatataaaatcagagaaagatgagctggacaaagaagtggtagagtgccagtcagttttatcatcagctgagaagtctgtcagttccctgaatcaggaagtgaaccagctgacccaggagctggagaaagcagccagccagctgccctctctggaagcggcctatgcggaagccctgaacaaccaggtaaccgaaatggtctcagtaaaagaaacgtaccgctccgacatgctctcctacgagtatgcgaagaataattatgatctaaccatggagaagctggatcaggagttagagacagcagaagaggcggtggccacagcacaggaaaatgcggagcttttggcaacccagtatcaggacggaattgtaagagccgtacgggacggaaagatacagatgataggatgtcaggagggggatgaattgtccggtcagagttctcttgtattttacgaagacacttcctataagaatatctcaatttcggttagtcaagaggatgtcacaagtgtagaggtgggagatacggcgatgatttatattgaggagaccggacagctggaggggacggtaacagcggtatctgcatcatcggcttccgagagtgtctctagtgtttcttatacggttacagtggccatagatggtgagagtgaggggatagaaaacggcacgtccgcagccgtatacctgaatatggaaggtataatgggaggtccccaggaaaataatctcaaaagcccgggggaacaggatccttaatggaagcttattgcagtatcagttcatagtgtgttataattcccatattatattttagaaagaataaatgggaaaatagatgataagaaaaataaaacaaatgtggaaggctgtacatatggaactgcaggagcacaaaagttcctttctggtttatgtgatacttcggctggcagtgcttcttatgatggtactgcagctgtttaacggcaattatgaaaatgtatttttgtgcttactgaccctggtactcttgatggtgcccagctttatccaggtaaatctgaagattgagctgccaaccacacttgaaatcattattctcctgtttatatttgcagctgagatattaggagagatacaggcatactacatcagattcccaggatgggatacacttcttcacactgtcaacggttttctggctgcagccattggattttctctggtggatctgctgaaccggaatgaaaaagtaaagtttcaactgtctcctgcatttacggctatagtagctttctgcttttctatgaccatcggtgtcatctgggagttttttgaatgtggtatggacttattcctgggttttgatatgcagaaggatacggtgctccattccattacatcagttatgctggatcccacaaaggggaatcatcctgtcactatcgaggggatcaaggatgtggctgtcaacggagaaagcctggggctgggaggatatctagatatcggccttctggataccatgaaagatctttttgtaaactttatcggtgcggtagtcttttctgtcattggattcttctatgttaaatccagaggaaaaggaaaaatggccagacgctttattcccagacggaaaaagagagaggccgactttttgcgcatcattcaggaagaagaaaaaaaggaagaataaaatagtaaatggaagctaacccgcggggataccaaagataaggtgtcaccgcgggtttttctgtgcatgcctgcgctttttaaggttaatttcaggaataactagtatgataaggtagaataaaaaaggcttacgaaattcagaatatacaggcaaggagtaaagaaatgaaaaaaaagagaattatagccgttgctgtcactgccgtcgttgctgtatccgcggtatccgttctctgctattacaggggaaatgaaaaaacagcagaggtagtcactaaggagacaacggtagagagaggcaatattgtaaccggaatcacagagagcggcagtgtcagtgtaggaacccagactcaggaatacgatctggaaattgtacaggtagatctcacctcagcaaatacagggagcagcagtacggggacatcaaattcttcagtatcgaattcttctggaaccatcagtcagcaggagacagaggaaagcagcaaaacagaaaccgggggaaccaatcaggcagccccgggcaatatgagtacaggaggtacagacagtgtgtccggtttcatacagacctcaagtggaagtactgctgttccttctgcgggcagtacaaccggaacttcctcagagacaactctggttgtggaggaggtctacatagcacaggggcaaaaggtaaatgccggagaaccgatattgaaggtgacagcggacagtacggacgcctttcgggcggaattggaacgtgcagttgcgaatgccgaactggctttaaaggcagccgaactggaagacgaagagacaaaattaaaggcagagagcgaatacgaaacctatcaggcagccggcagcgtggcagaagcggtgtatgaggcagagattgcctctattgacaataatattgcttccctccagtcccagctggatagcaccagtgatgctgcacaggcagccagccttcagtcccagctggatcaggcaaaccgtgaagccgagaccaaaaaattggaggccagacagaaatatgaagagaccatgctcaattatgaaaatgcaaaagaattgtatgaggtttcgatgaacagtgttggtcaggcggcagaggaggcgcaggagactttggataccgccagtgaaaacttggccgctttccagtcgctggttatagacaataccatttacgcggcctgcagcgggactgtggtcacctcttcctatgcggcgggcgacagcctgaatagcgagactcctctggcagaatatgcagatgaaggtgcagtcaccatagaagtttccgtcatgcaggatgatattgaaagtgtgacgataggagatgaggtgcagatttcatttgcagcttttgcagatgagacttattccggcacagttacggctatagatgcagcggataccacttcttccaccgtcagctatccggttaccattgcccttgacacggtgccggaaaaagtgctgacagggatgacagccaatgtgacatttattaccaaagaaatagaggatgtactttatgtatccaataaggcagtgatagctgaagatgcaaaatcttatgtgaaagtaaaagacgactccggcaatgtgcagaaggtggaagtaactacagggttttctgacggggtgcatgtagagatccaggagggactcaaggagggggataccgttttgattgaaagtaaggtggaatcatgagatcgggagaactgctgcgtctggtatggacgaatctgacccagaataaattcaaggtgattatgacttctgtggggattatagtgggagccgccaccattgttatggtaatagccatcggaagaggcggacagatggacgttgcagaacagttcaaaaatttaaatgcgggagcgattgatatttcttatgaaggaaacggaagcaatatgggccagtttgaacagagaggcggggaaagctcagggaacgattttggcggaggtcccatgccgggaggaggtttagggcctcagggaacttttggttctgatatgggcgctgactttttcagtggaggtatgcagatgccggatatgggagcgtttggcggattcgggcagtctgaccggattaaccaggaagcggttaccttgtcattggacgatgtggacgatctggagacttttgtaccggatatcacctctgtgtccatctcctattctactaagcaggaggtggatgggggagagctggaggaggcagcctcctataccgtggcaggtgtgcagagtgggttcagggacatcagcaatctctctatggctatcggtgattttctgacagatgccaacgatgagaatatggaaaaggtgtgtgtgctgggagcgacagcggcaaaagagattttcggaagtgcctacgaagcctatgacggtgagatttatatagacaacaggccttatgtggtgaacggcgtaatagaagaagtgggaactgtctcttccggaatcagccctgatgaaggcatatttatcccttataatactggagtcaagtatattacaggcagcagcatcagtcccactattacggtgatagcctctgatgtggatgagatcagcacggtgatcacgaatatagaaacagttcttgcagagagctatcccaatacggaatttaccatttctgatgcgggaagcaagatggaagccgccgctgaatccaataatatactgaccatgcttctgattgccatggcagccattgtctttgtagtgggaggaatcgggattatgaatgtcttatttgtcacagtaaaagagcggacaaaggaaatcgggatcctgaaatccatgggatgttccaagaaggatatactgctggaattcctgatggaatccagtgtgatcagtatcatcggaggtttcctgggcgtcggattcagcttccttgttacacccattgtagaacattttagcgtaagggtggagctttctttgtggggtgctgtgctggcagttatctttgccgttatcaccggcactctctttggattttatcccgcactcaaagcatcccgtttgattcctatagaagcattgagcgaggagtaaaaacatgagaaaaatgatatgtttgtgcattacagggattctgctgctgtcgggctgcggtaaaagcgcccaggccggcactggtgcagcagaagagacagcgctgaaggataatcaggaagtagtctatggacagatagaaaccattgtgggcaatgatatgaccattgccctggcagaggcagaagagacagaagtacaggggaagtctcctgctcagatgacagaggaaccaacatccgccgacggagaaagccaggctcctggccgggacagtatgcctgatatgggagagatgccttctgactggggagaaaatttgcccgagggcatgcctgcccaaggggagatgcccggcaaagagcagaacggaggagaacagaaagatactcagggcagagaggataccggggaaaaggaagacacacaggcagggcagaagattactacctacactctgaccggagagagaaaagatatgaggatccctgtgggcactacagttaccaccagtctgggtaccactaccacgttttcgcggctggcagcaggagatatggtaaagcttgtggtacaaaaagaggaagacatgaaccaagtaattgtgggtatctggattgtggggtgagaatatgaaattgcacatagtcaaagaaaagaagaatggggagaaacagacgaaagaatttccggctcagacggttatgatacatatggacaaaataaacaaaagctatcagatgggagaggaaaagctccatgtactaaaagatgtcagtctgacggtagagaagggggaatttcttgctgtcctgggcccttccggttccggaaaatccactttgatgaatatgataggctgtatggatataccggattcgggagagtactatctggatggaaatgccatacacgaaaaaagagacaaagagctgaataaggtaagaaatcgggagatcggttttatcttccagaaatatcaccttatctccacttataccgtggtacagaacattatcatgcctcttcttatccgggggatgagccatcggcaggcacaggatgcctgtatggagacaattcgtatgctgggactgtccgatcggctgaatcacaaaccttcggagctttccggcggacagcagcagagagtagctatcgccagggcactggtatcagagcctgccgttctgcttgcggatgaacccaccggggcactggataccagaagcggagaagaagtcctgaagctttttggtaaactgaataaaatgggccataccatagtgatgatcacccacgatctggaggtggccaaggcggcgcggcgcacggtaaggatagtggatgggatggtctttgagtaaacgaaaggaaaaaggaggcatatgctctcctttttcctttgtctctatgaatggaagctattgcattagaggggatttccggtaaagtcttgttctgcggtttctacaagctgatccagctttttcaggatggcgtcctgcagcaatttgggcctgtgggtttgcagtagttccagcattttatcctgagctcttttcgtcatggttttcgatcccgccttttgccagtctccgtaggtatggcggtccatgagtgatggattccagatttcatcccggaagaattcaaaggtatgctcttcggagaggaagtttcctccgggaccaacatcctcgatgacctcccgggcaagatgctcttcatccacagggacaccttccatcattcttcttgccataccgattagctcgtcgcacataaccagatgaagaggggaacctgtcattcccaaatccataaagcccacatcatggattagattccctccggttcccagggcccctataatctgaagcatggcttcggcggcagactgggcatccacagttttggagtcactggcaccggcggctgtaaataccgggaggtccagagcgtggaagacttccacggaagcgctgtggagcaatacccactccggggcaccgtaggaatgctgcatggttttcatatccatggggcctccgggagcaccaccaataaagggggcgccttttcgcactgcctggctgagtaccagaccggtaaggcattcgcacagtcccacagacagggcgccggctacggtgacaggtgcagttgcccccataatcataccaggcgtataaacacaggggatattgttttcagcgagaagcatcagtttctccagtgcatccctggagtgcacaaagggagtggtaggttcactgtatataatgataaagggcttttcctgaagtgcttcaaggctgcctgctgtcacggcgcacatatcaatgattatctgcaggtttctggcgttaaatgcccatcccaccagtggttttgtggtattacgtatcatggcatcaatctcatgaatgtctgccaattcttttgttttatcacctatcatacagagtgacatagcaaaatcaatatttggcagggcatctgtcaggactgccgccagggcggcatcatttttcacagctttccgccgttccccagtatatgcgtcaaagaaattggggcaggtagggccaggtccaaagtatgtattctgtttcccgaggtccatggcttcttttccgtttcggtcatagattttgataacactgggggctgattcaatggatgtcttgaccagtttgcgggggattttcacacgaacaccgtcagcggtgcagccggcctgaaccaagcattccagggcttttggtgagtttacataaaccccttgttcctccaggagcgaaaaggactgttgaatgattttttcccgggaatcttgggttaacagttcaaaaataggttttgcagtcatggtaattcctccttttatttaaaatagttctgctttctgctttttgattttactaagtaacaggcaggatgcaatcagtcccacaacagaaaagagaagcataatcacgaatagatagcggtaaccggccgctccggggtatttatccagaagactgccggcaatagtattcatatatacatccggcagaaaaccgataactgagataatacctacagcggttcctgtgacattcaggggtacgttcacctcgtcgacaatagcaaaataaatgcctctcatggcaaaaatggctgagcacattagaatcataagcactaccaagaatatcagcatgctggccttggaggggaggaaggcaatcccgcccagagttatgacaatcataacaaaacagatggttaccactcttgttgtagatttcatctttgttgccagaaaccctccgcttgggcctcccagcagctgaagcacataattacggatgatcgcaattaaggcagagatggaagcggtagcccctaatacctgtgtaaaataaggtgtcatataagtactgccgatatatacactgtagcaggtaataataacaaaggctaaaagccatacagtgggcatccgcagtacctcacctaccatcttcagattgattctggattcttcttcctggctttgattggaatcgtcaaagacaaaccaaaccagtatgccggcaatgatatttacaatagcaatggctacaatgattccggtcagtccgccgatgctttctcctaacttcccgaatgcaaaaagagagacggctgagaaaatcgttgacattaatccgcgtccgccttccagaagcccgaaaagctttccttgttcatcgctgttaccaaactgtctggtggctttcagcatagctgcccagaagatcaaagtggcagcacaaccccatacaaaatggataaggatctgcataagataaccgggataggtagcaaaataaaggcctaggattccggtaataatgaaggctgctgtgagaagcttgcggggagagaatctgtcagccatccatcctccgggggcataaaaaatcatggaggcaacaccgtatacgctcatagtaataccaaattgcttgtttgtgataccgatggcttccagaagaacatcgtaataggtccatctaagatatggaagcagataaatagccgaagctcccatacagagaacgagtaacttaacatagcggttcacaccttttcgttctttcatgaattaacctcctaactcaatgtcatataaaatatcgtatactatattttatatgataataacaaataaaacactaaatgtcaatgaattttcagagacaattcaaataaaaatctatttcgctgtttactattgaaataatgtaagatataacttaaaataatggagagtacccatattgataaatgttgtaaaaaggaaaggtttgttttataatgaggaaaatataaaaaagggtgaagtctttgattacaagtacaaatacggcaaacgtagtaatggattatttgaaggaacagattataaaaggcgggtataagccgggggaaaaaattaatattgatgaattatccaaggagatccagattagcaagatccccattcgggaggcgctgatgcagctgcagcccgtcggtttggtgaattatacggctaacgtggggatgagagtggctgccattgacaatgatgaggcaacggagatactggaagtactgtctttgctcactggcagagagtatactctgagcagattaaaagcagatggagctatgagtgtgtatcaggaattgatggggtatggggatatatgcagcaatagtcatctgaaagaagtgattcagatatatagcaatcaattattactctggagagaagaataagatgatacttaagaaaaagcaaacgttaaatgatcaaatatacgaacatataaaaaccagtatcctgaacggagaaatcctgcagggagagaagattataccggatgatctggcattgaaattaaacgtaagcaagactcccatccgtgatgccattaacagactgctgcaggacaggctgctggaaaaggatactaatagtatttttgtccatattatgtcagatgaagagatttctatgctggaggaggcaattatcgctcagattctggccggatacaggctctgtgttctgaaagggaaaagaatctctctgattcatatgctggaacagcggctgagagagcagagagatgccatagagattggggatatggaaagtaatataagaagtgccatggaatttgataagtcctttgtactggagacgggaaatatccatctgatacagaacattgaaagatcctttgaacttttccagattatggtggcaaattatcaaagtgatacggataaccagcatatcagctatgaggaccatgcagatattcttcaggcagcaaagaaccaggagatagaggtaatggaagggctgattatgcagcacctccacagcagtacccagagagtaaaactggagataggcagaaaataagagcggcactgtgatatgatacccctgaagtagacaaggtaaataaccaaaatctacttagggggctgatcagatcactgtaccgctcttatttgttctgaatattaagtctgcaatttattttactaccacacctgatttgataacatttacaaggttgtatttgaatgcggagatgtcttccagcgggttcttgtccagagctatgatatcggccaccttgccttccttcagtgtaccgtaatcctgatccttgtatacaattcgtgcactgtcaatggtagcctgtttgattatatccatctcatccatatcccagaaatcttttctcaggataaattcatctgcgttttccccgtgtgtcagaggggtaccgccctggtctgtaccgaagccaatggtaagtccagcttcataggccttgcgaactccgactcttaaggattccagaaccttctgggcttttgccttcatgaaaatagaggtttctggaacactgtcagccagcccgtgaagaatattcagagtaggtacaatgtaagtggtatcattatcctttaacatctcaatggcctcgtcgtcaaggatagaggcatgctcaattgtacggacacctgcgataatagaatttttaatggcctgtgttccatgacaatgggttgccacataagtatctttaaaacgtgctgcttccacaaccgcccttaattcgtccagggtataaatcggctggccaggggccccgcctggattcataaccgcgccggttcccatgattttaataaagtcagcacctgctttcatttcctcccgcacagatttccagatggcatctctcccgtcagcctcattatacaggccggcaaagaaatcatttccgcactctgttggagttacaatttttccggatgcaatgatattcggtccggggaagttgccggcattgattgcattacgaagttcaatggcaacgttgtgggaggaacctacatctcttacggtagtaaatcctgccattagtgtgtcattggcaaattttactgcgtccaaagcctgctgaaccggggattttgcattgtctacaagcgtctctccgccggagagcgtcagatggatatgtaaatcaaaaagaccggggagtacgtatttgcccgccatgtcaaccgtttcagcatcttcccagtctgttccgcagggagcaatgctcttaatccggtcaccgtcaatcaggatatcaccggttgcattttcatagccttctactaattcccccaaaaagttacagttttttaaaactaacataatacctccttctgccatccccatatggcatctgtatttaatattgtacccttatagtatcatagggaaaatattttgtaaattataatttaatgtataaaatgcatggtttattcgcgcaattatttgattaattctttgatgtttttgtaatccataccatagctgtcactgacatttttacaggtactgaatccgtcataagtattaatgcctgagaatatgacctcattgtcaagacaggcattttcaagaccttttccggcgatctgaagaccatattttaaagtggcattggtaagagcaatggttgaagttctgggaacggctcccggcatgtttccgacacagtagtgaacgacaccgtcaacctcaaaggtgggattgtcatggtaggttaccctcgttgtctcacagcatcccccctgatccacggctacgtccacaatcagactgcctggcttcatgtcctttagatattcttttttaatgagcttaggagctgcttttccgggaatcagtacagagccaatgaccagatctgcctgagccagctggctttggatgttggaaggcgtgctgtataaggtctggatgcgggctccaaagatatcgtccaggtaggccagacgttccagattaatatccataattgttacgtcggcgcccatgcccactgcaattttgcaggcgttggtacctacactgcctgcgcccaggataacaactttagctttgggagtacccggcactcctgagagcagtacaccagatccgccaaatggcttctccagatattttgccccttcctgaatgctcagacgccctgcaatctggctcataggagaaagaagcggaatactgccgtttttctcaatcaaagtttcataggccacgcctctgataccggaggacaacatagcgtctgtgagtggacggtctgctgccaggtgaaggtaggtgtaaaggattaaatctttgcggaagtacgaatattcggattccagaggctcttttactttgatcatcatttcgcaggtgtcccacacttcctttggtgtatccaaaaggatcgctcctgctttttcatattcttctgtggtgaagccggaacctataccggcgtctctttcaatatatacggtatgccctgcatctgtatacgatttgacattgtctggtgtcattcccacacggaattcattatttttgatttcttttacacatcctactttcattctgattctccattcttcatttttaatctgaccatagtaccatgcgcgcttggataataaggaatattattcttcaaaataataaaaagatgaaaaatattctttaatataaatctagaatagcacgtgaggtataaaaaaacaattagcagtatagcaccaaaattggggacaaaaattatacaaatttaacaaaatataggaatgataaatgatatttttataacaaacttacaatatcaaaggaaaattaagttgaaaaagcagaaggaatatgtttaaatagaatttatagaaagtgaaataattcacaatttgaaacacagcgagaggggaacggctgttacgatatacagcggaaagtgagaagaagagtgaacagtataagggcattaatatttaattccaatctgacaaagacagaacaggtcatcggggattttgttctggataatctgggagacgcttgttttatgacctccactgacatagcggtgcatctgggggtcagtgaagcttctgtcatacggtttgcaaaaaaactgggatattctggttttatggagtttcagaaatcgatccgctcctgttaccagaaggaaaaaaaccagatttcggcaagcttggatatccctgcggaacgtctgaagaaaagcagacaacaggaggacaagaactatatcagtaactatgccgccatagtacagaataatctcaccagcgcactggtaaataacaaatgggagacgtacgaaaaagcgattgacttaatattaggcagccagaacaaatatatcctgggcaccagggcaaatatggggctggccgcagactgctatgtactgcttaagagaattatacctggggtaatgataactaacacatccgctgccagcgtaattgataacctgagcgatataaaaaaggaggattgcctcattgcttttagttttcccagatattcagaattagaccgggtggccatggagatggcgaaggatgcaggggcgcggattatccttgtgacagacaggcacagcgcacctctggcttcctatgcagaagtcatttttacagtagatatagatagcaatgattattttaattcttttgttgcgggttattttattattgaaatattatgtgtgggaatgagcagaagactggggaatgtacatgaagagaaattaaagcatattgaccattatctggatatgctgagaatctattaaaatgagcgcctgatataccgtcaggcgctcataaggaatgttctgaatttttttctataaagcgtcttgtctgaagcatctttttatccatctgttcgccgattgcggcacattcattcagttcgtggaatatttctttgatgctcagggaattatgcttgtatcgggtttggtgatccagacgagcccagaaatccataataacggtgcgcagctggacttcaactctgacaggttcctgctgtttatttaaaatcacagggacttcaaaaataagatgcaggcttcggtatccgctttttttaggggttttgataaaatctttctccttcaccagaatcagatcctcttcttccaggagtcgtttccggatggcatagatgtcatctgtataatcgcatacaattcttaccccggcgatatcatttaatttttcagatgccttttttacactgattggatatccttttttggttaacttcctcacaatactctctgcgcttttaatcctggaacactggaattctacgatatcacgtccacattcacggctaagctgatcctttaccgctgtaatataattttgaatctcttccactgcaagctcgtatttatagataaattttctttcctgcagttccctgtatacgggcggcatattttttttgtctttattattcgccaatctcatccatcctttctgtaccaaataatacatacaagaatagtttatgccgactgtctgaatttgctaccaggaatatgtaaacaggaagaaaaatttttgtaaagctgtatacttttcttattttggttcatactataagtaatccacggagggatgccgcaaaggcgcggcgcttttcgtggggaatacagaagaaaagaataagaatacttatcctcccccttatagtaaccccgcagcagttttgctgcggggctattttttattacataggaaactgcgttcctttgtaataaaaaaacctctggggataacactgcggcggaaaggaagatgctgtctgcgacagcccgccgcaggcggagattgcgctttcgcgcaatctttcttataaatccttccgaataagcatatttaaaataatttcaattaagttgtataatttgaaaaatagaggtcatactataagtaatccatcagacagtgccgaggcaacaaagcacagctgttggttttaaccaaagaaaaagtagaatacttatcctccccttattgcccctgcagttatacgaatccgtataactgcaggggctttgcatgtatggcattctatgtacacagataccatattccaataactgtatcgccgatacaggatactagaaccctcagcagttaataggagctgtggtgtcataaggccaatcctgataacttccggcattgtacacctgggtataaccggcgtcggccagcagttccacggcctcactgctacagtcttgggtactgcagtatacatagatggcagcatccttgtctggcagctgttcctttgccagcatctttaagctgttcagcggaatattgatggcccctggtatatggcccatgccgtagtcattaaaagaacgcacgtccacaagaaccatttcctgttttgcatccagcatgctttttaattcctccggtgtggtgctgacatctgtttgagcggcctgcgaagatgcctgctctttcgccggagctttctctttacaggcagagagaagtacggagagggcaatcagtaaaacaaataaaacaccgagttcttttttagcgatactaaaacacctccttattcaaatcaaactgtaatcaatttagttacatttataactctatcataacagcagcacagaagtctgtcaagtaaaaaagccgtatccggaacatagatttttccggatacggccatttcttgaatttataaaggtttaaacatattcttcatcaacaatcttgttgtcagtgggatatacctttccctctttcattacaaagtcacattcactgagagcgtcacagtctgtcagaagatctctgtgccatgcggatacatcagccagttttccgggctcaatggttccaatgaggtgatccagacggagtatgcctgcatttacgctggtggcggctttcagagtacggaagggatccatgccggaacgcagccagctacggtattcataccagctttcataaggctggtgtaccgcgcaaaaatcagagccgtaacccagacgaatcttgctttcacggatgattctgcggctttctttcagccttggagcaaattttttcagtttcatctggctgtcagcggtattctttgcaaacatatcatcgttatcctcaagagtatcctggaacggtgagaaggtaggcacaagataggtatcagactcttcaaacatgcgggccgtctcttcatccataagagcaccatgctccatgccgtcgattccgaactgtaaaagttttttcatcatccggggcggatacacgtgtgcagttaccggcttgcccaggtcgtgagcagtgcggatgatggtttccaattcttcatcgtccagataactgatctcagggcctccgtccgggctcagaaaacttccggacaggaagatcttgataaagtcagtgccgtattttacttctctgcggacctgggtgcggaaaaagtccgggccgcttccgatggtatctatctgcataaaatcagataagggctgattttcataggcatacatactcatgtctcccggcatacccggtcctcccagcatatgtgcccctacattcatacgggcagcagggaaaagtccccggtcaatcacacgttttgcatctacgattccatatcccagaggccccataccgttacagcggatggtagtgaaacccctttccaggcagcgctctgccgtatgtaaaaatgccagggtactgtagccttccgaatggaataagatattatctacttcttgccagcgcatcaggttgccatgtacatgggcatcgatcatccccggggttactgtgaggtgacttaagtcaatgatttcaacatctttgggacggctgagattctttccgacttctttgatttttctaccttctacaagaatctccatgttttcctgcagttcatccttgattccgtcaaagagcttgccgcagataattaagctttgcttttccatgattctacctcttttcttcattttttagtccctgaggacgtaaggcacaaaaaaataaattcattacagtgaaaaagttttgcagacattttcatcaaatgtgacaaaaaatcacaaaatttcactatttatatagattatatgtctaaaacaaaacaatgtcaagctaactgaaaaaaagatatacatataattaatactgataatattcataaaaatgaatgatgggaaattaatttttctttccggattttttttcttccgcaatggttttcaactcttccaaggcatccttgaaggctctggaggtagcgcttgggtgccctttgagcatctgcttcttatagaatcccaaacggttccgcacaactccctggtgttcccgctcaataataaacttttctttcaggcgttcaatctcttcctggaactgttcataggtagtgcgaaggccctcgctctgagtcagctcatccagcttctcccggatactctgaagaagttcacctgcggtttccttcccgcgctcggcaaaggaaggggtagagaaagcagcaatagcgtccagacgtgtctgtaccttctgaagctcttcttttgctcttgtcatgcgctccataatatctctgagatccagggcagccttaaaggaaagagccatatctccggcaatgacaacagtcagtattactgctatcacagctgccagtgtgacattcagcgccaatacgaaatgctcaataggttcatggataaaatccaccagcacgatagtgagaaagccccatgccagggaagtgcccagacagatatgtccctggaagttcaggggcttattgctgtaatcccaatatcggactttaaaaaggctctccatgcagacccctgtaatatattccagtatactggcagccactgcccctgctgcaaaggtaagaatcaggctgttccgtacaggaatggtcacatacagcataagtaccgctccgctgccatacagcggaagaaagggtcccctcataaaccctcggttaacaaactttttcttatgtatggatacataagaggattcaatgcaccagccgataaagcagtaaatatagaagaagagcagccagtccaccgttgtatagttataattcataaactccctcctagcttttgatacagctattatacaatcctttccttaaaaatagcaacctgacaggggaaaaatattaggattgaaaaaatcccccctatcgtatatactatatctgttagaattaaatacgaatattaagcaaaaggtggtaagatacatgggattattacaagagtggagagatgtagcatattctcaggaggctgacaaaagccagctgcagaaattctggacaaattattttatgattgaaaagggcatctacgaaaaacttctggtgaatcctgaagaggtggtaaaaggtaccgttaaggagttagcagaaaaatatgaaatagaagttatgaccatggttggattcctggacggaatcaatgacagcttaaaggttcccaatcccatcgaggagatggatgaagatactgttgtgaatctgggatttgacaaagaactgttatataagaacatggttgacgcaaaggctgactggctttacaatctgcccatgtgggatgatatctttacagaagataagaaaaaggaattgtatctggagcagaagaaatcaggtactgttgtaaaagggccgaagatcggacgcaacgatccatgtccgtgcggcagcggtaaaaagtataaaaagtgctgcggaaaataatacgcaggcgaacaaggggcgggggaagcttttctcccgcccctctcaggtaatgaaagggatgggaagcatcatgaagtttttttggtgggcactgtgtatcatatctctgggatattatctggtaattatctcctatgcaggattacaggcgacgttttccaggttctggctgcttttgggcgggatatttctggttctgggacttctgtgcagctggagccagaggcggggaattgccctgcttactctgttcccagtctgggcaaagataagcgcgggtctgcttgcagttttttgcctgcttttgtttctgggagcagcaggctgcattgcctccgggatgtgcaggctgcctccggggaatctggactatattattgtgctgggggcgaaggtaaagggagaaattcccagcaaggctctgtataaaaggctgtatgccgctgaagactacttaaagaagaatccccataccacagcagtgctgtccggcgggcagggacccggcgaaacggttacagaggccaaggcaatggaacaatatctgctcagtaaagggatctccaaacacaggctgagaatagaagacaaatccacagacacagtagaaaatatgaagttcagccaggcttttctttcagataaaaatgtctcggtaggagttgtaaccaatgattttcatgtgtacaggggcgtagctgttgggaaaaagctggggtatacgcagatttatggaattcccgcctcctcagatatgattctgcaggtgaattatctggtcagagaatcctttgcagtgataaaagacaaagcagccgggaatatctaaaagtggttgacaaacttttttcccgggttataataaaaaatagcagtaatatgagaacacgctgaagagacaagtagaatgtggaaggctccagagagagatacagctgctggaagtatcttagccgggaaacatttgaagactacctctgagtggccctaatccggcccggtgactccgttatcgtccaatgaagtggctgatgctccggcggagcaggcagcaaaaagggtggaaccgcgagctgataacagaggctcgtcccttgtaattccggctaagaattacaggggacgggctttttttgttgcattaggaaagttcaccttacttcctatgtaatgaaaggccctccgggcgggatgcgcactgcacgtaagggcatacgtttgtgcatctgtgccggcagggtggtaaatgagacgaaaagaaagggagaatattatgataattacattgaaagacggaacaaagaaagaatacagggaagcaaaatctgtgtatgacattgcgctggacatcagtgaaggactggcaagggctgcctgcgccggagaggtggacggggagaccgttgacctgagaactatagtggacaaagactgtgaattaaatattctgactgcgaatgacccaaaagggctggcggctctgcgtcatacagcgtctcatatcctcgcagaagctgtgaagaacctgtatccggaagcaaagctggccataggaccttctattgatactggtttttattatgactttgaacatgagtcctttaccagagaagatctggatgctattgagaaggaaatgaagaagataattaagaaaggcgccaggctggaaaaatacacccttcccagagaagaagcgattgcttttatgaaggagaagggagagccctataaagtagagctcatagaagatttaccggagggagaagagatttccttctactctcagggtgattttgtggatctgtgcgcaggtccgcaccttatgaacacaaagggagtgaaagcgtttaagctgatctcttcctccggtgcttactggagaggaaacgaaaagaataagatgctctccagaatctatggaacagcattcagcaaaaaggatgagctgaatgtatacctggagcagatggaagaagccaagaagagggatcacaacaaactgggaagagagatggagctttttacaaccgtggacgtgatcggccagggacttccgcttcttatgccgaagggagagatcatgattcggacactccagcgctggatagaagatgaggaagaaaagcggggatatgtgagaacaaaaacacctctgatggcaaaaagtgatttatataaaatttccgggcactgggatcactataaagagggtatgtttgttctgggagatgaagaggcggacaaagaggtatttgcactgcgccctatgacatgtcccttccagtattacgtgtacaaggcggcacagcacagctaccgggatctgccgctgcggtacggagagacttctaccttattcagaaatgaagactccggggaaatgcacggccttacccgggtacgtcagtttaccatttctgaggggcatctgatcatgacaccggaacagatcaatgatgaattcaaagggtgtgtggagctggcactgtactgcctcagaacgctggggctggagaaggatgtaaccttccgtctgtccaaatgggatcctgcaaacacagaaaagtatatcggagatgctgcgtactgggaggaatcccagggtaagatgcgtcagcttctcacagagttggagcttgactttactgaggctgacggggaagctgctttctacggtccgaagctggatatccaggcaaaaaatgtatacggaaaagaagatactatgattaccatacagctggactttgccctggcagagcagtttgatatgtactatattgatgaaaacggagaaaagaaacgtccgtttatcatccacagaaccagtatgggatgctatgagagaacactggcctggctgattgagaagtatgcgggcaaattccccacatggctgtgcccggaacaggtgagagtacttcctatatcagaaaaattccatgggtatgcggctgaggtagaggctaagctgaaagagaatggaatccgctgcagcgtagacgacaggagtgaaaaaatcggatacaagatacgggagagccgcctggcaaaggtgccgtatatgctggtagttggggcaaaagaagaagaggaaggtgtggtatctgtgagaagccgttatcttggagatgagggtcagaagccgctgggtgcttttatagaagaaattgccaaggaaatacgaacaaaggaaatcaggaaaatagaagtggaaaactagatcaggggtgcatagattcagtaaaacggcacatactatctccgattctaatataaggaggtaaattatatgccattattgagctgtactgccaaatcatgcatatataactgtgatgaatattgttccaaaggagatatcctggtttccggagaggatgcaaaacagccggatgaaacctgctgctctagcttctgtgagcgtaccggggaatcttcttcaaactctgcaggatgcggatgcaagacaatcagtgttgactgcgaagcctgtcaatgcgtatataatgacgatgagagatgctctgcagacaagattaccattaacggggcaagtgcctgtcactgtgatgatacaagatgcggcagctttgagaaagaataaagagaattggggacaggaattcacaagaattcctgtccccgtcttttatacactgatcattcccagattttccagaatagaaaagatcaggatagcaagcaggcagataggtgcaatgtatttaataattacctcgtagaattttttggccttaaactcaccgttaatagatacctcgtcctctatcactttgggttttatgatatatccgataaagatacaggtcagcagcgccaccacaggcatcagaatgctgttgctcacaaaatcaaagaaatccagaagctggaatccaagcggccgcagggagtctaatacaccgtatcccagagagacaaagcttcccagcgccagtataaatatggtaacagccagggttgctgaagaacgcttccacccgaacttgtctcttaagatcgaaaccgttgtctccatcagagagatggaagaagtaagggctgcaaacagcaccaggacaaagaaaacagtgcccagtacacctcccagagtcatgtcgttgaaaaccttggggagagtcataaacataagtccggctcccttgtttagcgccgcctcatccccgccggagaatacgaagacagaagggataatcatcagtcccgcaagaaaagcgattcctgtgtcaaatatttcgatctgtcgtaccgatttctccagatggttatcttttttcatgtaggagccgtatgttatcataattcccatggccaatgacatagaatagaacatctgtcccatcgcagccagcactgtggtgatagagaagcggctgaaatcaggcagcagataatatttcacaccctccatggctcccgggcgtgtgatacaaaacagagtgattccaatggagagcacaataagtacgggcattaggattttgctggccttttcaattcctttttgtacaccggcaagtacaaccacggcatttaaaatgacgtataaggcaaaccatagaagaggaccgcctgtctgtgaaatataacccgtgaagaaagtgtcacccgcagcttctgccactctgccggatgcaaactcaaaaagatattttgctacccagcccccgatgacacagtagtaaggggtgataataaaggggacgatacatcccagatatccgataaaactaaaacgcttgtccagggctttgaatgcacctaccgcgctgagtcctgttctgcgcccaatggcgatttcagtggtcataagtgcaaaaccgaaggttacagccagaatgagatacacgagcagaaagattcctcccccgtatttggctgccagatacggaaagcgccacagattgccaagtcccactgcggatcccgcagctgccaggacaaacccaatcttacttgaaaaatttcctctttttttgtccataagtttctcctttttccagttcaagtattccgatctattatgacattcttttacataaaaaacaaggatttataaagaaaatattaaaatgcttgacttaccattttgtttatgataaagtattaaaggtctgagtaagacatttgataaaacaaagcagagtatccactctcacctcggcacataggcgtgaccctggttaatattaactgtaattctgcagtctgggactgcaaaattataatggtatgaagtggatagtgcggctattcgctttttttgtatgcatggcagatacagcaaggtgcgtacgggtggaggtaacaggttttaacatttcaactattcaattattatggaggtgcactactattagcgatttaatgattaacgaacagatcagagacagagaaatacgtctgattggtgtggatggagaacaattaggtatcgtatcaacgagggatgcaatggccaaagcgcaggaggctgggctggatctggtcaagattgctcctaccgcaaagccaccggtttgtaaaattattgattatgggaaatacaaatatgaactggcaaggaaagaaaaagaagccaggaaaaagcagaagaccatcgatgtaaaagaagtgcgtctctcacccaatattgattccaacgatttgaacaccaaaacaaatgctgccagaaaattcatatccaagggcgataaggtgaaggttactcttcggttccgtggaagagagatggcgcatatgtatgccagcaagcatattttagatgaatttgctgaaaagctttcggatatagccgtgatagaaaaagctcctaaggtagaaggcagaagcatgaccatgtttttaactgaaaaacgttaaaaaatagaaaagacaagtattaaggaggaatatacaatgccaaaaattaaaacaagcagagctgctgcaaagcgtttcaaaaaaacaggtacaggaaaattagttagaaataaagcttataaaagccatatcttaaccaaaaaatctcagaagagaaaaagaaatctgagaaaacctactgttacagatgcaacaaatgtaaagaatatgaagaaaatcttaccttatttataagatagaagttaagttagtataggaggaaattaagaatggcaagaattaaaggcggtttaaacgctaaaaaaagacataatagaacattaaagctggcaaaaggttacagaggagccagatccaaacagtacagagtggcaaagcagtcagtgatgagagcgctggcaagctcctacgcaggaagaaagcagaagaagcgtcagttcagacagttatggattgcacgtatcaacgcagcagcgagaatgaacggtttatcttacagcaaatttatgtatggcttaaaattagctggtattgagatgaacagaaagatgttggctgatatggctatcaatgatgcagaaggatttgctacattagcagagcttgcaaaaactaaaattgcctaattttatttgggacgttgcctcgtaagggagacaacgtcccaaatgtattttgcgcatagtacatgatctacggtacatatagtgaactaaaaggcctttcggagtaagtatagtgaaaaaatgtggatatttactctatttctttacggccgtttttctgctgttgctgggtgttcacctattgcgggagaggggagttggggagcagatcattcaggcggacgcacctgcggagtcaggggaggatccggttgtggctttgaccttcgatgacgggccggaccccatatatacccccaggctgctggacggattaaaggaaagagatgtaaaagccagcttttttctcataggaaagatgctggagggaaacgaggacatcgtagaacggatgtttaaagaggggcacttgattggcaatcataccttcgaccatgtgcagctgaataaattatcagatgcaaaggcctgtgagcaggttaccaagaccagcaacaagatatttgaaataaccggaatgtatacggcatttatccgcccccccttcggagagtggaaaaaaaatctggactgtaacgttactatgattcctgtattatggaatgtagattccctggactggacaacaaaggatacagatgctattgttaatagagtactgaaagatgtggaggacggagatatcatccttatgcacgacaattatgattccagtgtaaaggcagcactgcggatcgtagatgcccttcagggaaaggggtaccgttttgtaactgttgatgaacttttaatggattagcagagatgagggacaaaggagtaagatgcagaatctaatactgtcattctcagtagtatttccactgtttgcgtatatgctgctggggtttggaatcaggaagatgaaacttttggacgcccgcatatttaaacctctcaatggaatgatttttcaggtgtttattccaattatgctgtttgtggatgtctatgagtcagacttcaagtcttctgtgaataaaggactttttttgtatgcggctgttatggtgatactgctgtttctgctgctctgcgccgcagttcccagatttgtaagagataagaaagatgcttctgttatgattcagggaatctaccggagcaattatgtgctgttcggggtgagtatcggggccaatttatataaagacggggatatcggagtaattgccgccatggcggcactgatagtaccgctctttaatatactggcagtgattctttttgaaatgtttcggggcggcagggtaaaacccgccgcagtggtgatgggcgtgctcaaaaaccctctggtgggagcagggattctggggatactttttgctgtgctgaatatccggcttcccgcgctggttgttgataccctggataacatcggaagtatggcatcccccatggcgctgatctgtctgggcggtatgttgtcttttgaaagcttaaggaagcacagaaaaaagctgggagctgtactcttgggacgcctgatactggtgcctgcggcagcggttgctgtggcagctgcgctgggataccgggaagtggaattggtggggatactggcagtctttggttcccccactgcggtagcttcagcacctatggcccagtccatgggcgggaatggagagctggcaggagaaattgtggccaccagttctgcagcctgcgtggtgaccatgtttttatttatctgggcgcttaagactttgggatgggtttcctgagcaaggattaggatacacaattgcttcagcggacagaagcagggaaaggcggataagaaatggatttatttgattatatgaaagaggtaaccctggaaaatgagtccccgttggcttccaggatgcgtcctacttctctggaggaagtagttggacaggaacatattattggaaaggacaagctgctgtaccgggccattaaggctgataagcttagctccattatattttacggacctcccggaactggaaaaaccacacttgctaaggtaatcgccaatactaccagttcccggttcacccagatgaatgccactgtggcggggaaaaaggatatggaggctgtgattaaggaggctcagagccaactggggatgtatgggacgaaaaccatattgtttatagatgagattcaccgttttaacaaaggccagcaggactaccttcttccctttgtggaggacgggactattatactgatcggggccactacagaaaatccatatttcgaggtaaacagcgctctgatctcccgctccattatatttgaactccatgcgctggaaaagaaagacatcgaaaaattgctggagcgtgcggtgtcagacaaagaaaagggcatgggaagttaccaggccgtgctggacgaggacgcgaaagaatttctggcagatatcgccgggggtgatgccagggctgctctgaatgccatagaattagggattctgaccacggacagagccggggacggcaagatccacattgatcttcagaccgcttcccagtgtattcaaaaaagggtcgtaagatacgataaaaccggagataaccactatgataccatctcagcctttattaaaagcatgcggggatccgatcctgacgctgccgtatattatttggcaaagatgctttatgcgggtgaagacattaaatttatagccagaaggattatgatatgtgcagctgaggatgttggaaatgcagatcccaatgcacttaatgtggcagtatctgccgccctgggagtagaacgcatcggaatgccagaggcccgcatacttctctcccaggcagtcacatacattgcctgtgctccaaaaagcaatgcctcctatatggccatcaacgaggccatggagtctgtaaaaaacaagaaaaccacagtgcctccccatctccaggacgcacattatgggggggcatccaatatgggccacggaatcggatatcggtatgcacatgattatcccaatcattatgtagagcagcagtaccttccggacgagatcaaagggagcagattctaccggccggaagacattggctatgagaaagaaatacggaaatactttgctgcaataaaataaaaaaggttaaaaaggggacgtgtactttctaaaaagtacacgtcccaaactcgatcaggcctgtccctttttacttttaaagaagttcccccataatatgtgcataaatctcctggcttttttcctgccagcggctgcatatggttgtggcggcctcttttgtaggcaccgtcagggtcatatcaatgagataggactgccgttctatcacttgacagcgaacctcatactcatctgcgttttttttgtaatagtcggcaatggtagagacttcattgcgcagttcataggcatgggaattgaaaaactctataatttcttcctgaatctcaggtgagatctcattctgaaaataatgaatggtttcttcccctttcggtgtgattcggtaccgtgaggaattcctaacggtgctcatctccagtaattcggaatcaatcagttgattgatcgcttcctgaatgtgaaagtatgttgtatatcccttatccagaataaactcagatatttgagaattagtcagagggaaatttaccttatctaacatgtataaaataattaatttgtataatgtcaatggttctgccatatttctaattctcctttccagtatacagcctcccctgccaggtttgccggaccttacattcatgatgaagagtgtttaatactgtttttttggcgctgctccacagaggcgcaagtaacagatcccttggaccatccccggtgagccggtgaatgacgatatccggtgacatatgttccagacaggatatcacgagatccagatattcctccatggtatagacctgaaacgctccgcttaagtattcctcggccaaatctgtaccctttagtatatggagaagctgaagcttaataccctgaatatctttatgattcagataggatatggtctggagaatatcttcccggctttctccgggaagccccaggatagtgtggacaataacttccagattgcgctttcggagttctttgacagcctcctcaaaacaggaaagtctgtagcctctccgaatatatgcggcggttttatcatggatagtctgcagccctagttcaacccacacgggcttttggcggttcaaagcatccagcagatctaacacttccggacccaggcagtcaggccgggtgccgatggagagggcagctacttcgggatctgccagagcctcagtaaaaacagaggtcagatgggaaatgcttccataggtgttggtataggcctggaaatacgcaataaacgtttccgcttttctcttctgacggattctgtctttttgttccttgatctgttcagcaattgtgagagatttatcggccgcaaaatctccggaaccgccggcactgcagaagatacagccccggtttcccagtgttccgtcccggttcgggcaggtcatcccaccgttaagggctactttatatacctttgtgccaaaacgttccttcagcatataatcaaaggaatgataaggcttaccgttccattccatcttagtgaatatgcttttttactgcctctgcaacagcatcggcaacccggggatcaaatgcttccgggataatattttcttcatttaagtcttcttctgagattaattctgccaaagcggtcgccgcagccattttcatttcctctgtgatctgtctggctcgtccctccagagcgcctttaaaaatacctgggaaagctactacgttattaatctgatttggaaaatcagagcgtccggtaccgataattcgggcacctgcagccttagccacgtcaggcataatctccggtaccgggtttgccatagcaaagataaaaggatctgaattcatggatttaaccatttcttctgtaacactgttgggggcggagactccgataaagatatcagccccttgtaacgcatcggccagactgccggattttccttcctgatttgtaatctctgccatttccttttttgcgggattgttggcattctccttgttgactatacctttgctgtcacagagatacatgtggaggaatccgtaattgagcaaaagctttccgatggcgataccggcagcaccggaaccattgatgacaactacacagtcttctttcttcttgccggtaagacggagactgttaataatagctgccaggaccactacggcagtaccgtgctggtcatcgtggaaaacaggaatatccaaaagttcttttaagcgggattctatttcgaaacagcggggagcggagatatcctcaagattaatacccccgaaagagggtgcgatgttaacaacggcctttataatttcttcggtatcctgggtatcaagacaaataggaacagcattaacacccccgaattctttaaataaaacagcttttccttccataaccggcatagccgccagaggtccgatattacccaggccaagaacagcgcttccgtcggaaactacagcaattgtgttagccttctgtgtatatttgtaagctgcttccgggtcttctgcaattaccttacaaggctcagcaacacctggagtatatgccagagaaagatcttcccttgtttttacaggagccttggaaacggtttctaactttccattccattcttcgtggagtaaaagggctttttcgtttgttgtcatagtaacagtaccctacctttcttattatatgtagtttgttcggaactttctttatcataacattatggaaaaataagtgcaagatggaagtgaaaattgagatttaatggtgtaactgggactttggttcaagacgcttcaagacggcaggtgtgggtgacagggggacggtgagagaaatcccgcggcagcgggctggctggttcggacgggagggaggcttaagttccggggacacctccgtcgcgaagagagtctaagacaaaaccggaatccccgccggagcaccgttcgtatgtgcaaagaatgcttgatgtgcattctctgcccatgctcactttttttcggccctgactgccgaaaaaatctcctgcgggaatcccggttttgcctaagactctctactcactcctgcggaatcgtccccggaacttaagccctccctcccgcccgaaccgccagcccaccgccgcaggattcctctcacctgggtatagggaagttcaagggagttggctatttatccaaaacatcgagttatcaatagtgggaaaccagaggaaaagtgtacaacgttcgaccttccccacccgttttccgtgaatgtgaagtgagtttctgccaggtcaagggaggaggtcttggggccgggggtactgtgtggagctgcgcagactacggagtgcgtccgaagatccactgccggcggtcacttaggagcgaaggctttcctgagcttcttagtgaacggccaggcagttagcagaggagaaacgcagcagcaagcagatccacacagtacccccggccccaagacctcctcccttgaccgtccgtctgcgacactccgctcgccgactattttatctcgaactttacatacacaaaactataatttccatatttatccagatgacactccctcccctcaatgctatactggaaaaaacatacaaatgatagactggcctgaaattgcggcagatgggagagtaagatgagggatagagataaaatggaactctatattcagaaagaggatatacaggacttccaggagtttctctatgaaagagaatattctacagcaacgatcagtaaataccttacggatgtacacacgtttctgaagtttgcaaaaggaaaggatgtgattgaaaagtcacttttactgagatataaagagtggctgatgcaaaattatgcagtttccagtgtgaattctatgctcgtttctctgaatcagcttctggaatatctgggcggaggttttttgaaactaaaaagggtgaaggtacaaaaacagaactttgcagatgaagataaagaaatgtcaaaggaagaatacataagactgaaaagggcagcagccgagaatggtaaggctcagctggcacttattatagaaacgatatgttccactggaatacgaatcagtgaattatcttattttacagtagaaagagtcaggaagggatatgttgaggttcataataaaggaaagtcaagaaccatcctgctgcctgagaaattaaggagaaagctaatttattacgtgaaaaaacataacatcctgtcagggtgtatttttgtgacaagaaatggaaagcccaaagacagaagtaatctgtgggcagaaatgaaagccctttataaacaggcagaggtatctccagagaaaatttttcctcataatctgcgtcatttgtttgccagggtatattatagtttgactaaagatcttgcgggacttgcagacattctggggcacagcagtatggaggtgacccggatttatacggcgcattcagggaatgtttatcagaaaagaattgacagtttaggtctggtcaattaaaacatataaataccacataataatagttatgtggtattttaataatgagatttgtaaatattacatagatttatcttataataattggaataaattgtcaatgcgcttgggaaaatctacgtaacaatatattttgtttcaaatataaatatttttcagtattattatggtaaagaggtaacctaaaattaataatttctttgtgtatgtttttattctaccacataactattattaggttgtaatatagcatcactacataatctacggctgactgcagtacgtgccggataagagaaggaaaaagcatgaatagggaagaacttttagagcgcttggcggagaaactgggatacgattatatatcggatctccatataatgaataattatgatgacatgctgaagatcctggaggatatatctccagatgagtatagcctgggggaatggaactcggctgtacagtatttgctgcgggaagagattgtgctggagtcaccccggaaagcaagagaatatctgatggaaatcttaagaaataggggttgatttatatttgacaaataggaaacagagtgatatcgtgctgttagatggaaagtttagaggagtacgatatgaagaaaatagttgcaatagtaatcgcagttgtcactttgctgactatggcaggatgtgagaaaaaactggaagaggatggaacgccggtaaatgatttacttttagagtccggtatactgaaggtagggatggagttaaaggtgcctcctatggaagctctggacgaagaaatgaagccggtggggtttgatgtagatttgatctatgcagttgcagagaagctgggggtaaaagtagagattgtggataccactgaaaagaatcttctgccgtctctgggagcaaaggtctatgattgcgccatatcaaccattccgatcacggaggacaatcaaaaagaatattatgtgaccaggccgtatgctgatattactttggtcaaagatcagattagtaataaagaggcagagggacagttagggatttttgtaagcaggaaaaatggacagctgatgctgagaatagataaagccctggaagaattgcgcagcgaaggcaaagtgtcagaactgtctcagcagtattttggaacagatatcacagaagggctttagacaattgacaaagcaggagatactgccggggttaactggagcagcatacaagcaaaggaaaggaaatacaagaatgtagactttcctattgcttgtttttttatgctcacgccccatagtcaggggttattttcatttcgtaataaaatttttgtatacttttgcaagaagggattgatttttttggttgaaaatggtactatgtgcatatagttcaacgggtaaacaaagtgctaagggaggttattttgatgaacatattaaaggtatcagatccggagttctgcaggtatggaaaggtaattactgggattgactgcagtgacatggcagaggcgatggaagccacaccgcttcccgaagatgtggtttatgtagcttcagaggcttcattggagtcatgctccagtgcggagaagattgcatacagcctttacgggggaatgcccattcaagtgggatactgcaatggcagtaattatctgctgaatgctgcggaatatcacagagactcagaaattaacatcgcagttacggatatgattctgattctgggatgtgaacaggatattgaaaaagacggtacatatgacacgtcccggatggaagcgtttatggttcctcagggaacggtaattgaagtctacgggacaacacttcactatgccccctgcaatgtggcggaaagcgggtttaaatgtgtagtggtactccccagagggacgaacacagagattgaaaaagaaggtccctatacagaggaagataaaatgctttttgccagaaataaatggctgattgcccatccggatgccaggattgagggagcattcaatggtctgaagggagagaacctctcagtaaagtaggtttttataaaaagaaatatatcatttatggaggaagaacaatgaacaatatgccaaaagtaaagttaggaattgtagctgtcagcagagactgttttccggaatccctgtctgtaaacagaagaaaggcgctggcagaggcttacgctaaaaagtatgatgcagaggatatctatgaatgtccaatctgtattgtggaaagcgaaatacatatggtacaggcactggaggatatcaagaaggcaggatgtaatgcactggcggtatatttggggaacttcggacctgaaattgccgagacactccttgcaaaacattttgacggcccgaagatgtttgtagcagctgcggaggaatccggagataatctgatccaaggcagaggggatgcatactgtggtatgctcaatgccagctataatctgaaactccgcaatataagggcctatattccggaataccctgtgggaacagcagaagaatgtgcggatatgattcatgagttcctgccggttgcaagagccattatcgggctatcagagcttaaaattattagcttcggaccccgtccgctgaactttctggcatgcaatgcgccaatcaagcagctctacaatctgggagtagagattgaagaaaattcagagttagacttatttgaagcattcaataagcatgcaggggatcccagaatcgaagatgtggtgaaagatatggaagcggagcttggagaaggaaatatgaagccagagattctgccaaagcttgcgcagtatgagctgacccttctggactgggttgaagagcacagaggctacagaaaatatgtagcaattgcaggaaaatgctggccggctttccagacacagtttggttttgtaccttgttatgtaaatagtcggcttacagggatggggattcccgtttcctgcgaagttgatatctacggagcgctgagtgaatttatcggaacttgtgtaagcgaggatgcagtcacccttttggacatcaacaacacagttcctgctgatatgtatgaaacggatatcaaaggaaagtttgattatacacacaaagatacctttatgggcttccactgcggtaataccagtaccaaaaagctttccttctgcgttatgaaataccaaatgattatggccagaagcctgccggaggaggttacacagggaactttggaaggtgatattgtgccgggcagcattacattctaccgcctgcagagcactgcggataatacacttcgtgcttatattgcccagggagaagtgcttccggttgcaaccagatcctttggatccataggtgtatttgcaatcccggagatgggaagattctatcgccatgtattgattgaggggaattacccgcatcacggagcagtagcatttggcagctatggaaaagcattgtttgaggtatttaaatatattggcgtggatgtggacgagataggatataatcagcccaaaggtgtccgttacccgaccgaaaatccatttgcataagagttagattgtaaaaagggacagggcaggggcaatcggggacgtgttccttttaaaaagaacacgtccccgattccgattcagataaaggagaaaatgatatgttatatattggtgttgatttaggaacttcagcggtcaagctgcttttgatgagcaaagacggcaagattcagaagattgtatcaaaggaatatcccatttcttttccaaacccgggctggtcagaacagaagccggaggactggtgggagaagacggtagaaggaattaaggagcttacagcagaatgcgacaaatcccaggtagcaggcatcagctttgggggacagatgcacgggctggtgattctggacagccaagatcaggtgatacgcccggcgattctgtggaacgacggaagaaccggcaaagagaccaactatcttaatgaagtaattggaaaggaaaagctgtcggaatataccgccaatattgcctttgcaggatttacagctccaaagatcctgtgggtgaagaaaaatgaaccggagaattttgccagaatcagcaagattatgcttcccaaggattatcttgcctataaactgagcggtgtgcactgctctgactactcggatgcctcgggtatgcttctgatggacgtgaaaaataaatgctggtccggcgagatgctgaatatctgcggtatccgggaggagcagatgcccaggctgtatgagagctatgagactgtagggacccttaagagggaagtggcagaggaactgggcctgccggagaattgcaaaatagcagccggcgctggggataatgcagcagcagcagtgggaacgggaaccgtgggtgacggaatgtgcaatatttccctgggcaccagcggtactatctttatctccagcaaagaattcggcgtagataaatacaatgcacttcatgcctttgcccatgcagacggccattaccatctcatggggtgcatgctgagcgctgcctcctgcaacaagtggtggatggatgagattatcggaacagcagattacgccggagagcagggaaagattgggaacctgggggagaatcacgtgtatttccttccctaccttatgggggaacgttccccgcacaacaaccccgatgcaagaggtacgtttatcggcctgaccatggacagcaccagggcggatatgacccaggcagttcttgagggggttgcttttgccatcagagattcctttgaggtcgccaagtctctgggaataaagattgaacggactaaaatctgcggcggaggcgccaaaagcccactgtggaagaagatgatagccaacattttgaatattaaggtggatgttatcgcatccgaagaaggacctgcaatgggaggagctatgctggcggcagtggcaaatggagaatacgcttccgtggaggaggctgcagaggctattgtcaaagtggttgacaccgtggagccggaacctgcgcttgccgtaaagtatgacgaacggtacaaaaagtttgccaaaatctatcctgcagtgaaaaacctgttcagcgaaatactgtaaccaaacaggaacatggcgtgtattcccatgaaaatgcctccaggtccccttacccttgctgttttgcaaagattttgcttgattttaaaaatcagggttcgtataatgcaaggtaggtccacactgacctgaggaggcgaaagtatgaaatatgttttagacgtgcatacccacacgctggccagcgggcatgcctacaatacaatggcagagatggcctgtgcggcaggcaggaaagggcttcagatgctgggaatcacagaacacgcagttgaaatgccgggaacctgctgtacattttattttgaaaatctgaaaatggttgaccgggacaaatataaggactgctatggggtagagctgcttttgggtacagagctgaatatcctggattaccagggaaccattgacatggaagagagaaccttaaaaaagatggatgtaaccattgcaagcattcatcctccgtgctacaagagcggtacaaaagaggagaacaccaatgcttatctgtgtgccataaagaacccttatgttaatatcatcggtcatcccgatgacggaaggtttaagccagattaccgtgccgttgtacaggctgcaaaagagtacaaagtgctgctggagctgaacaataattccctggatcccagatgtttccggcaaaatggcagagagaatatgctggaattgctaaaatactgtaaagaataccaggcacctgtaatcattggcagcgatgcacatgtggatgatttggttggggctcacgagtttgtggaagcactattaaaagaaacggaatttcctgaggaattggtagtgaaccgttctgtggaagaactgaaaaagtatgtaaacagatacagataacaaagagagaaacacgcggttgccaggccgggaatcttaaagacagattcccggcctttccctgtgtctggaaatacaaaagaatatcttgaggttaagacactctgcagggaggaaattgccgtttggtataattgataaaagcagtagagtcgctgtagaggggacgttccttgttccacaggatcccgataaataccgggtctaactgcggttcaatgggaactccaacaatatcctcgttgtgcagaatggtctcctcaaaaagcagtccccctaccgagtaatctgaccggagaagctgcttgatggtatccagctgattagaacggaatataatgttaggcttaagggaagccttttcaaaagcagtgctgatgattttattgctaaaggaaccgattcggttgaccacaagggggatctgagccacctcccggagggtaatgtttttgagactggccatgggactttccctgtgaaccgccagactcagccttgtggttagcagagtgataatacgcactgcattcaggttggcataattggttatggtgattgcaaaatcaacctgtcccttttccaccacttcataacactccagcgcccccaactccaggacatcaatggtaacatggggatgtagttttttaaatccaataaccacttcagagaacagaaaggtttccactgtgggtgagatagcaagcttaatctggtttctggaacgactcaaatctttcattttctgcgtcaggtcattcacatcctgaagaacatgggttgcctctacatagaacagttccccctcaaaggtgagtgtaagtttctttttttcacgcttaaacagcagaaggttaaactcctcttccaaagccttgatggaattggtgatggaaggctgggaaacgtgaagtttttttgccgcagcagtgattcctccccactggcatacctgctgaaaatactgtaattgccgaagtgtcatattatcacctcctgtattttttatcttattcttttttaacacgttggtcaagaaattctgctttatcgatagtttaaaactatatattcaaaagaaagatgtaatttacacttcgggtaaacagatatacaataaagaaaacgctgggatattagtaaaaaagtagaaaaatttaaaagatacaatttaattatctgatataactgcgtgaacccgggtatcaatttaggttactattcatagttctgctttcaggcagttctgagaatagcagcatgcttcgcggcgcacagataaagtgcgtcctgcgccatatggcagtttacagcagctatcaactgagcgcccgggaagctaaggggcccttctatagattccgtcccctgtgccggccgggagaaaggaaagagtatgttatcagacagagaaaaagagaggctgcggtctttgggaaagcagatacgggaaattgctgagctggatattcagaaagaaaataaaaaattatggacagcagtgaatgacggacagatgatacgtccggtggtgattgccagagattatccggttttgcttctcatggaaggaccagatgccatccggccgacaatcgaagatccttatttcagacaaagggagatggaaatgcttttaaccatctatgaatggaaccacctgcggggggaccgggtggtggaaccgtacctcaatgttccgatcattgctgaagattccaacgtgggactgcggatgtccagctatccggctcagtggaccatggatccggaagagcttcaccgggcatatgcctttgagagagtactctggaatgaggaggatgtctccgcaaaaatcaaatggcccaaagttgtctaccgcagagaagaaaccatggaacggtatgaacagatgtgcgagattatggaagggattatcgaggttaaattattcggaattcagaatttccggtttgccatgtttgacgatatttttgcatggacaacgattgatcagggtatgacagatttggtcatgaacccggaatatcttcatctggcggctgagagatatgcagaatgctttatacacagagccaggcagtatgaagcacttggccttatctcttcaaataattccaacacatatatcggaaacggaggctatggatactgttcagatcttccaagtcccacacagagcgggattgggggaaagctggaggataactggggggtggcacaggatcagatttttacatccgtatcccctgagatgaccaaagaatttgcatttgagcatgaaagggcctggaccgatttgtatccccgtatctattatggatgctgtgaacgcctggatcacaaaatcgcggaactaggaaccttccccaatctaaaaaaaatctccgtatcgccgttcagcaattgtgaggctgcgatggagaagatgggaaaacgttatattgtatcatttaaagcacataatacatttatcaatctgaatccctgcggctacgagcttcttacggaagagctgaaaaaggtctgccgtctggcaaaaaagtatgggagcagtgttgaaattattatgaaatcgattattgatctgaatcatgaaccacagaggctctgggagtggtgcaggctggcgagtgagatcgttaaaagttattgacaagttagggaaatgattaaaggaaggagagattacattgatgaaaaagataatggccttggtacttgcaggaattatggttttgggaggatgcaccggcagcacggattctgcttctgaggacacggagaaagacagcgcccaaaatagcagccaggaggtaaaggaagtaacgattcttaccggtccctcagggggaacgatggaaattgtgggagcggctaccatagagctttttaaggctgctatgccgggaacagagttttcttccgttcccagtaccggaagcgcggtaaatgtaaagcttatggacaacggggaagcggatatggcaattatcacagcagatacgctggcagcagccatcaacggagaggaaccttttgaggaagaatatccagatcttatgtccatgtgcgccctgtatcccaacaccatgcagctgtgggcgctgccatcctccggaatccaggattttgcggatctgaaaagcaaaaaattcacctgcggacagttcggcggaggcccctaccagccctgtatgaatatgatgaagacctatggctttacactggatgacatagaagcaagcgggggagagatgacacctcttgcatggggggaggctaccaattcccttcaggatggaaatattgacgctgttttctggacaacctcgttcccggcagccggaattgtgaatgcggccgtgggaaaagagttcagcctggtgcagatcaatgaggagaaattgaaagaatatacggaaacgtatgaggggtgggtagatattaccattcccgcaggaacctatgaattccaaaaagaagatgtaaaaacaatagggacacccaatctatatgtagtctccagggatatgcccgaggatgtggtgtatgagatgacaaaggcaatctgtgaaaactatgatgtactgggaacttcacacgctctcctgaaatccttatcggatgaaaccattacccagggggtggtaggggagatccatccgggagcgcttcgatactataaagaaaaaggaattaatgtctcataagggagaggatttcaatggaaaaaacaaaaggcggggaccgatacgacaggatatgcggagtcagcattcagatattgggtgcggcaatggcatttttccacttatacacagctcttatgggtacgctgacaggtacctgccagacggcactgcacctgctgtttatcggtctcatttattatttagggtatcagtctaaaaatgagagatggaaaacagtaaccagaattttcaaccttgtatttgcggcgggaatggcagtaagccttggatacaacattattgccaataaaaagctgatgatgcgcatgatgcaggtcgataaggtgaccaccctgcaggttatcctggggattttgttaattgtatctgtactggaactgacacgccggtgtctcggaatggcaatgcccatcatagccattatttttatcctgtatgcattcactgcgaaatatatgtccggagtattgtattttaaagggattgggctggaccgttttgtggagcagatgtatctgaccttccagggggtattcggagaagcgctgaactcttctgccacctttgtggttatgttctgccttttcggcagttttctgcaggtttccgggggcggtcagttcttccttgatatttcaaagagcgcggtgggacgtttccggggaggtcccggtatgatgaccgtaatctcctgcgcactcatggggacgatctccgggagtgccattgctaatgtagctgcaaccggtgtgtttactattcctttcatgaaaaagggaggatatgaaaagaactttgcgggcgctgtagcatctgtggcctctacaggagggatgattcttcctccggttatgggggccggtgcgtttattatgtcagaatacctggggatctcctatgccaggatatgcctttacgctttggttcccgcacttttgtatttttttgcagtgtttctacaggtatatctggaagcgcggcgtctgaatctttcgggagttcccagggaagagattgaaccggctctttctgttatgaagcgggcaggatacttattgataccgctccttgtgattatttattttctctgcgcaggatattctgccatgagggcagccttttacgggattatttccattattgtggtaagctttttccgcaaggaaacccggatgacacctaaaaaatgcctggaggcaatggtactaggctcaaaatcctgtatctctgtggcaacagcctgtgcaagcgccgggattattattggcgtgctcagatttacggggcttggcttaaaattcacaagtgcagttgtcagtatctccggcggaaaccttatggcagccctgatactgaccatgatagcatccatcatattaggaatggggattccccctacggcagcctatgtcatgcaggctgcactcacggctccggcactggtgcagatgggactggaacccattcaggcacatttgtttatcttttatttctcctgtatggcgggaattacgcctcctgtagccatctgtgcatatacagcggcccccatagcagaaggaaatcccgggaaggtgggatttcaggcgtttcggctggccctgtcttccttcatcgttccttatgtatttgcctacggcacaggaatacttctggtaggaaatatcattgacatagttctggctgtctgtacgacactcatcgggattgctatattgtctgtggcagtttccggctggctgaagtatcctataaaagtttatctgcggattcctctgtttggtgccgccgtactgatgatggtgcagggggtaacaacggaccttgtggggatcctcatagccggtgtgagctgtgcggttcatctgcgaaggccggcagtatcaccggttaaatagagaagaaaggagaattggcatgaagatatctctgggctatggaaccgggcagcaggaggtaagtataccggacaggaatcttcaggctgttttaatgccccgagggacagagaaacaggaggatgaagatatccttcttcgaaaggcactgcgtcatcctatcggaacacccaaactgagaacgcttttcagatccggtgaaaaaatcgcggtagttgccagtgatatgacaaggcctctgcccaccagccggattatgccggtgctgttggaggagttgactgccgggggagcacgtctggaggatatcacactgatctttggattggggattcacaggcaccatacagaggcggaaaaaaggaagctggcaggagaggcagtgtatgagaggattcgctgtgtggattcagatccggaggattgtcttctcctgggatatacttctagaggaaccccggtggagataaccagggaggtcgcctctgcggatcggattgtctgtctgggaaacattgagtatcactattttgccgggttcagcgggggcgccaaggctatacttccgggaactgcttccaggaatgccatacaaaagaaccacagccatatgatggagcctggggcggcgagcggttgtctggagggaaatcctgtgcgggaagatatagaggaagcagcagcaatgtgcaaaatagcttttattctaaacgtggtactggacgctgataaaagaatcatctgggccgctgcaggggatactgtgcaggcccaccgggcaggatgccggtatgtggacagctgctgcagaagaaagctgcagagtgccgcagatattgtaattgtgtctcagggaggagcgcccaaggatctcaacctgtaccagatgcagaaggcattgaaccacgctgcttatgctgtaagagagggaggcattatcattatggccggatatctgggagaggggatgggagagcctgtttttgaacagtggatgcgggaggcagaggagccgaaagaactggtgagaaagataactaagaacttttgtctcggaggccataaggcggccgccataggttctgttctggaaaaagccagtatttttctggtttccagtctgcaggaatccctggtgagggaaatatttatgcatcctttcggcagtgttcaggaagctctgcaggcagcatttcagatcatgggagaggaggcgtctgtagtggttatgcctgctggaggcagcatacttccggacttaaaataaaagttactgttcactccattctcagtaacaaataaaacattcgaactcattgacttcacaattttaacgtgataaaatgaagaaaagttgacgtatgatttcgttgatgcttaaaaatatgtgttgaggagaatgacaatgagtaagaagattcacacagaggcagtagactatctgtttgaggccattttaagtctgaagaataaagaagaatgctatacattttttgaggatgtgtgtacagtgaatgagattctttctctgtcccagcgctttgaagttgccaagatgctaagagaaaagaagacatatctggagatctcagaaaagacgggagcttccactgctactatcagccgtgtaaaccgttccctgaactatggaaatgatggatatgagatggtgtttgagaggattaataaaaaggagcctgaagaagtataacatataagaacagtcaagtgccggtgcacaggtagggaaacctgtgcaccggcacttttttcatatgaaaaggcagctgaggctccgggggatttttgtattatgttggatgatgtgtgaaaaaaataacggataaatccggaataatatacaaaatgcacaataaaagattggcagatttaccagtatacaaaacggtatacaatattgtatactcacagtgaagaaaggaggagcagagatggatacactgaatggaacagagagccaggtatatgaatatcttcgggaagcgattactaataagaagctctttcctaacacaaagattgtagaaatggatttggcaagggaactgggtgtgagcagaactcctatcagggcggcgttaaagcagctttcctacgaggggctgattgatattgtgcctaacaaaggggcctttgtatcttccccgtcggcagaggagattgaggaagtatttgaggccaagatgttaatagagacacagtcaattgccctggccagccagcatatacaaggatgggagattgagcttttggagaagtgcctggaggaggaagcaaggacacatgttgacagagatctgctggcttttaataaagtaaattatgattttcatacaatcatagggcaggcttccggcaaccggtatctggaaaagtacatctctgagctgacgacaaagagtaatctgtatctaatcttctacgatcgttttattgaaacaaatattgaggactctgccgcctataaagagcaccgggagattatccaggcattaaaagagagagatgccaaacgctgtataacatgtatgcatcagcatctggagcatacctatcaggggttaaatttgaaggatatgtaagtagataataaaaagcatgattccctatcaaaacagctgcaactgttgaaaatgatagaaaatcacgcctcgaccatttattattatacctcatatcctctaatttatcaataaatttcggagaggctgtctctgtgtcagcgcacgcttggcagggggagtgtatctccggtgaggccttagtaaagtgtgccgtttcaggccgcggcgaacattgatgaaaaaggaggaattttttatgcagaaagtggagttactttatttgtcacaggaagatattatggggcttggcatcggctgggaggagattattcatagagtagagctggcactcatagagcaggcggataaaaccattgagaatcccccgaaaagaggtatccattccagagagaacgcgtttatccatgaaatgccggtatatctgaaacagatggatgcctgtgggattaagtgggtgagcggttatccggataacagggagaagggccttcctcagattctggggcttcagatcatgaactgcccggatacaggggttccattgtgcatcatggactgcagatggatcaccggagttcggacagcagcggtaactgctgtcactgtaaggcattgtgccaaggcagattccagaggaattgcaatcataggggcaggcgttcagggcaagatgcatctacgggccatcaaacatgtaatgccttctctggaggtatgccgggtctatgatatctctcctcaggcggcaaaggtttatgcggataccctgggaaaagagctgaatatggaagtgcttccctgctcaagtgtggaagaagcagtgagagaggtagatatcatatttaccgcgacacagaaagtatccaggccatttattcccacagatgccctgaagccggggatgcttgggggaggactggaagccggcagagcctggccgaaggaactgcttcacggtgcagataaggtaatcacggatgatcttggccagacttcacaatatgccaccacaggtgcgtttgagggcggcctcccggaattctacggggaactgggggagattgtaaagggcaagccaggcagagagaacgatgaggaaaggatccttgcatttaatatcggcattgcatgtgaagatatttccctgggccagtatatatacgaaagggccagggataaaggagcgggcattatgcttcctttaatggaaaaagagttttaatcacccatatcacatgtaaaggaggtccggaattgaacagggagaaaagaaaaagagaacccagaaaagtaaagtttgctgaggcagtgctcctgctgcttataatcgtaataatcatggtgtggggagcgatgattgccaagatccccacagccatgggaatactttactgtgctgtcatatgtgcggtgtacggtgtggtattaggacacagctgggaggacatgttcagcaatgttttgaatgttgtaaagacagccatgcccgctttatattttttaatgctggtaggctttgtgagtgcctcctggattgccagcggtacgattccatatcttatctatatgggactgaaaatcatacatccttcgatctttttgtttgccgctatggtaatcacagctatttcgtccattgccacaggctccagctgggcgatagttacatccctgggccttgccatggggggaattggaaccggactggggattcccatgtatcttacagcaggagccgtagtatccggttgctttctgggagataagtggtcccccctgtcagatacgcctaacctggcagcagcgtccacggggcagaatattatccggttgtttacccatatgattcccacctcgggcctgggggcagtgatcggttcccttgtctttctggcagtgggattcaaatactccccgggaggtgcggataccagtgcggtaacacagctgatggaaggcctgaacagcgcttttcactttaatatactgctgttggcaccaattgtatttgtattcgttatggcaattttgaaatttccaattcttccagcacttgtcattggaatcggcataggcatgggagaggccgttatcttccagggaaaaacctttcaggaattgtcagggattgtgtggaacggttatgtatcagagactggaaatgaagtcatagacagccttctgacaagaggaggtgccatgagcattgcagggctggttcttcttttatttgccgcatttacttttgcgggaattctggaacggattgggattctggatgctatcatggataagctgctgttgattatcaaaggaaccggctccctgattgcctgtacggtagttacctccatgcttggtgtatttcttagctccagtgtgtatgtgtccatgattttgaacggaagaatgtacatgaatgcgtataaaaagagaaatctagatattatcaatctgtccagggctatagacgagggagcggcctatatgggaggaatgtgcccatggagcggcgggacgctgctggtggtatcttctcttggcatatctgcctggtcgtattttccctttgtattctccgcgtgggcatctttgattctagttattctgtggggatttttaggaaaatttacaccagaggcaggcatacaggaagaggcagaagcagaataaaagtgattagaataaataacaggacccaaagagctgtgtgccaggaggcagctctttgggtcctgtatctaacatccccgaaagtcagaaagcatcagtctactttccacaatcccagggcaggagttttaacaaaataaatttcttctccattttccagggtattccatccttctttcaaagtgtgaggattataaagggcggccgcctcttcatagtccatccactcatagcccacagtattaatatcctctttggacaggttttcaggacgggtacagtaagtgatagtaaaacgtccgtcggaagaaccctgaatcagatgggcagctgccatgatcctgttttcaaaagcaccttcattgaaaagcttcaggacatagtcgcggcccttatacccataggttctggtcatgcgatccatttcttcattttcaccaaaagcttttactccgggtgccagaataatgagctcccctccgtcggccacagccatacgggtgcggtatacgcccttattgcccacccaggtggttttcagctcgtaaggatccagataagttacaagctttttcgcccggcgctctacatggcagatattcagccggccggagagctctaccgcatgttcaaagggctttcgggaggggcctgcgtagaggccgtttaaggttacctgatcgtctttcagggtggttactgtctgaatataaacaagaggcagttttccgtccagaaaatgctgctgcgcatagtcaaatactttccgggccggggagtcggctacgcccagggctttctccatcccgcagatggcacttaacatatgggatttattgatcatctggcgtccgcccacacctacaaagatatttttgctgtagttggccattcctacaacctcatggggaactacctgcccgatggataatatcaggtcataccctccgttaattaacttttcgttgacctctacttcaatatccgtagaatacaggccctctgagatctcctcaatcacttcccgtggaacctggccgatggagatggtatctgtctgccagtgatgtaccagaaatgcttcttctggcacgacacccgcgaacatcttttctttttccccagcgtccatggccatatgagttcccagtgccggcataacgtgtacagtggctgttggggacagctttttatagagaacctgggtgatttccccggcataagaataacagcgggtaaagtcagggggaattatcaggacttttttcaagtccggatattgttccagcaattgttccatgcattgttctacctctgacatggaaatgccggacgcttcgttggtcatataaatctcgttcatgatatcctccttaggcggtatatttcttgagtgttgctcttacggcacccggacctgctgctaattctgcaaataacgcttccacagtttccccaaggccagcctgatataagtctacaccaaagatagcagcattggagaggatgggctggagtgcggcatggaaatcgcccttttgtcccagcttaatatcttttacacatgccatagagctttccagcagagggtctgagcttggcgtaaatgcattcccgttatcgtctacagcaagcagatagcggcaccagccagccagaaccagaggaataagcttcagatctttcacatccagagtatcactggccgcataagctttgatggtttcgccgaaacgaatgccgagtttctgagaagtatccgtggcaatccgctgaggggtatccggcataaaaggattcggtatgcggacctgaagcacttcgtcgataaactctctggggttgatgatgccgggatccacgacaaccggaagcccttcctgataaccgatgatctccactaattttttcagttccggatccttcatttcatctgcgattaatgtatagtccaggagacagccgtatacggccagggcagtatgaagcggattcaggcaggtgcagactttcatcttctctaccttatctaccgtttccttgtctgcaaatataactcctgcctcatccagattcggacgtccgttggggaatgcattctcgattaccaggtactgaggttcttcagagttgacaaaggctgcaacataggtgtttttgctggtaacaatagcctcaacatcatcaaaaccgtcctttttcagcatttcttttacgctgtcatcagggcgtggggttatcttatcgatcatagaccatggaaaggagatgcaggcaggatcctctgcatagtccagaaactccttgggaacaagtccgtgttcagaccaggctttcgcatatgcaattactgcatcgtgaagtctggtgccattgtgtgagcaattatccatacttaccagagcaaggggaagtctgccggcaagatagcgttcatagaccagcgcggtcagttttccgatatagctcacaggagcctggggaccattttcaaagtcagccttcaccggagggaagtagcctccgtcagcggcaaaaagattgtaacctttttcagtgattgtaaagcttaccatctgaagtgtgggagcagtaaaaatttcttttaagcgtgtccattctgcaacattggaagaatccacgatgacagattccacgatactgcccacgacggttttttcaatggtgccatcagactttaaggtaaccagtacacttagattgtcattgggacggtacattttttcaatgatctcatagtcaaaaccttctgctactataatcccggtatcggcttttcctgtatttaacagggtctgctgaaggttagctgtaaatgcgcggaagatattgccggcgccgaagtgtatccaggccggtgcttcctttgtttttgctgcaacagccttcctgtcgtactggggaagggcaaagccagcctcttcccacatatttttattgttcaatgcttcctgtgataatttcatggaacacaagtcctttcttatttccctaatttatcaagagtttcccagataccgtttaagtaggttgcccccagggctctgtcgtataagccgtagccgggtctgccggtttcgccccagatcattcttccatggtccggacggatatagccgtcaaagccgtttttatgcagagaagccataattcctaccatatccagacttccgcaggctgagaagtgagctgcctcttcaaatcctccgtccagaatctttacatttctcaaatgcacaaagtgaactcttcccattgcggaatacttatctgccagatgtaccagatcattggaaggagataccccaagagaacccgtgcacagggtaagtccgttgtatttgctgtccactaaggataacatccgatccagattcttctcacaggtaatgattctgggaagtccaaagatgctccagggcggatcgtcctgatggatggccattttaacgtcacattcttctgcggtgggaattacagcctgtaagaaatactccagattgctccacaaatcttcttccgtaatcttactatagtcgtcaaatacttctttcagggtctctttggtatagctggagtcccatccgggaagggataattctccggtgaggggatccatcttttcaatctgttccggataatatacaagggcattggaaccatcgggcagttctttgtcaagctgtgttctggtccagtcaaatacgggcataaagttatagcagataaccttgatgcctgctttgccaagacggcggatgttttctttataattttcgatgtactgatctctggagggcttgcccagcttaatatcttcatgtacaggtacactctcgattacttcaaagtccaggccggcagcctctacctttgtttttaaatcctctatactttcctcgctccagacttcacctacggggacgtcgtagattgcggttacgattgtgctcatatttgggatctgacgaatcttttctaaagttacggcatcgtcgtcgccataccagcgaaatgacattttcatatgctgatttctcctttcataatagggtagtatgtgattaatcttcgaattttaatacgattttcagtacatcctggggatgctctttgatcatggttaaagcgtccataatatctttatagttatatgccttggtcatcaaatcttccggatgcagagagccgtcttcaaagcctgcgatgacttcgtcgaagcagttgttgttgaggcgggaacctacgatggtaagctccttttttgtaatatcagccatggtaatctgagacggggcatccttcagaccgatacatacaatccgtcctgcagggcaggccagctgtacgctctgttcaaaagaagacgggatgcacacggtgtctaccacaacgggaattccttcgccgtctgtgaatttcattaatcggtcttccagattttcctcagagaccagaactacctcgtctgctcccatggacagggctttatccagccgctctttcaccagatcggtcatgataacctctgcgccgtttcgtttggcaacctgcatggcggcgataccgattgggccggaacccatgataagtaccttgtcaccttttgtcacctgtgcgcggttgttgatttccactcctatggtgaatggttctaccaggcctaagtaggattcatcaaaatccttatggaatttgtggacgttctgtgcgggagcggagacgaattcggagaagcctccgtctctgtgcacacccatgacctccaggtcacggcagacattatggcgtccgattttgcaggcatagcagtgtccgcagcttactaccggatccacagcaactttgtcgcctacttttacattcgtaacgtctgctccaatttctgttacaatgcctccaaattcgtggccgatgaggcgcggataagtggccagagagtttgtaccattatagattccgatatcagatccgcagataccgccggatgtgatgcgtacaataacatcgtctggattctgaatcgttggctttggtacatctacaatttcaactttaaatggctcaattactttaattgctttcattttaagatctccttgtgaatgaaataaaggtttatgtactgatgctctccccggcagttccagggcagtcagcactttgatattagataggaaactaatatattaattcaaaagccttatttctgggtattgcgcgattaaaattgaaataaggtgaaaatggaatggaaatggtgcttgaagtaatatattagtttaccttactgacactatagcaaatattaaatcaaagatcaatattaaaaaccactaacatccgaatgggaaaaatgtatatatttcacaaagaggtatgacgtcgtataatattccttcttatcatataagtatgcctcctgatttgtacttcttatttttattgacggagcctcaggcatatgatacgcttcctatcagaataaacaacacagagaccggaaaggagtgcggctatgccaattaaaatcgtagagaaaagagaaaaagagaacaacagagaatatgcataccgtttgctgcggcacaatattatgacacttcagctgctgccggggactacactgaatgaaggagaactgacagatctgcttagcatcagcagaacccctatacatgaagccatcctgatgctgaaagaggaaacgctggtggatgtatatccccagagcggttccagggtttcactgatccacattgatatattgaaggaggggtattttttgcgttccgtgattgaacctgagattatccgccagcttgcgggaaatgttccgggggagaagatggagtgcctgaaacaaaatctggatcggcaaaaggaggcccttcatgcagaggataagatagattctttttttaaactggatgataagtttcaccatttgatttattcagctgcaggaaaggatatcacctggtacgcggtgaaaaaagtaagctctcattatgacagggtgcggtatctggacgcgatcgtgaaccagacggatttggaaggcattttaatggagcacaaagatattgcacatattcttctgctggggatgactgctgactttgacctgaagcatttttatgacaggcatttgggaacctacagaaaacattttcagggtattttggaagaataccctggatatttccacatgtaaaaacttaccaataaaataatgcacaaaaatttaattgaaaatttataatatttcaacataattaatgtttcctcttgacgtatgacgtctgatttgatatagtcggtttatggaatggatgagatgtcatacgtgttatcacctgccgggaggattctggtgatagcgaaaagaaaaggagaaaagggggaaaacatttatgttttcaggagaaatggttacagggcctttgctgattggaatcttcattcttgcaattgccgtattactcgtattaattattaagtttaagctgaatgcttttgttgccttgctggtgactgctttcggtaccggtgtattagtaaatatgcccttggcagatgtggcacagactgttacagatggattcgggggaaccctgggcggtatcggtatggttaccggtcttggtgttatgctgggtaaattcatgtttgaatccggcggtattgagtctatctctaacaagattttaggtgcattcggagagaagaaatctcccatcgcagtagcattatccggatttatcacaggtattccggtattcggcgatgttgtttatattatgtttgctcctatgctgcgtgtactgtccaaaaagacaaagatttctatggtaaactttgcctgtgcaatttctgttgcaactacctgtacctttgcgctggtactgccaacagcacctccgcttgcggttgccgaggagctggggattgaaatcggtatctttttcttttatgctcttatctcagcatttgtcggtatgctggtggggggaatcgtgtacggttctttcctgaacaagcaggatcataagaataaccatttctatacctttgaggatctggaccaggaagaggcacagatggcaaaaggtgacagcaaagataaaatgggagcaggcaaagcattatcaattctgttagttcctattgtcctgattctcttaggaagctttgttcccctggcagtgggcaaggaagctgcaattgttccttttgttaccttcatcggcaacaaaaactttgcaatgatggtaggcgttatctacgcagcagtcatttccagaaaatacattaagaaaactgcaactgacattatgacggaggctgctgaccaggtaggtttgattctgttaatcaccggtgccggcggagctttcggtaaggttcttcaggcaacaggtattgcagattacgtagcaggtactttatccagcttcagtattccaatcttaatcctttgcttcctgattgcacagatcatccgttgtgcacaggggtccacaacggttgcacttatgacaactgcagcaattatgtccagcacaattgcaacaagcggagtatctccgattctttgtgcaattgcaatctgcgcaggcggaattggtctttctctgccaaacgattccggattctgggctatcagccgtttcttccgtatatcggttacggataccatccgtggatggagtatcggtggatttgtagcaggcgtggccatactgatcttcgtatcaattctttccttattccagggattcctgcctggactgatgatataacagaacaaggcgatcgcataggaaaagcaagaggctgtcattccattatccggaggcagcctctgtttgcatatagaaaaggaggttttaccaatgagcaacatacagcaaaagagtgcgccccagcgtctctactgggcgcagctggatgccctgaatatgggatccggatgggatgaggaggatattacaaagccccagattctcctggaagatgtatatggggacagccatccggggagtacacatttatcacagctgatggaacaggcaaagtacggtgtctttgaacgcgggggctttcccgcccagtatcacaccacggatatctgtgacggctgtgcccagggccatgacggaatgaattatgtactggcatccagagaggctatctgcgatatggtagaggttcatggatctgtgtatccctgggatggaatgattctggcttcttcctgtgacaagtccattcctgcccatctgaaggcggcagccaggctgaatattcctgctatatttataccgggaggcagcatgaggccggggccgaatatgacaacttcactggtggccggggatatttcactgcgtcagaaacgggagggggcgatctcagatcaggaagtaagggattacaagcttacggggtgtccttcctgcggggcctgtacatttctgggtaccgcaagtaccatgcagtgtatggcagaggccctcggtatggcattgcccggatccgcagtgatgccggctactatgcgggatatccagtcctatgccagaaaggccggccgggcgattatgggtcttgtggaaaagaatataaagcccggggatattatgacagaggcagccttccggaatgcagtcattatccacagtgccatcggaggctccaccaatgccacccttcatctcccatccattgcacgggagatcggtctggagctctccccggatctctttgatgagatcaaccatatggtaccccatctgggaaatataactccctcggggcagcatctcacggaagctttctggtttgccggcggcataccaatggtgcagtggtatctgaaagacatgctgaatctggatgttatgacagtcaccggaaaaactctgggagagaatttggacatgttgacgaaggagaatttctttgaaagaaatctgggttatctgtctaattatggcctcaccagagatgaggttatctttcctgtggagaaagctgaggaaaaggggtctattgcgatcctaaaagggaatctcgcaccggagggttctgtagtcaaatactcagcctgtgttaaggaactgcggatccacaaggggacagcccgggtttacaacagagaagaagaggcttaccaggctgtggttgacggggaaattaatcccggcgacgttgtagtcatccgatatgaaggaccaaggggcaccgggatgccggagatgctgatgaccacagaggccattgtgtgcgacgagcggctaaatggaacggtatcactggtgacagacggaagattttcaggggctaccaggggagctgccattggccatgtatctccggaagctgcatgcggaggccctctggccttcatcgagaccggagatatcatctcttataatattcctgagagaaccatagatgtggtggggattaacgggaaagagatgtctcccggggaggtaggaaaaatattagaagagcgcagcaagaagggaattatttccagaccacggcgcagcggtctgtttggcagatatacaagctcggctctttctgctatgaaaggtgccggctactaaaggaccaacaggcagaatattgcagaaaaatgccggattgctgtggatttcagaggaataacgtgttaaaataatccaatgtacggcagatgccgtacgtctgaccggagcgcatacatatagaagtgcctctgggtattaatgaaaatggaatggtaaatgaggtataaggcatgttagagtcactgaacaataacaaaaagctgctgccggaacaggtgtcagagcagataatccgactgatcactgagcggcagctaaaagcaggcgataagcttcccaatgaattcgatatggcccagcagctgagcgtgggcagaggcaccatccgtgaggcaatcaagatcctggtgtcacgcaatattgtagagatacgaaggggatgcggcacctttgtatgcgaccatcccggcatggtagacgatcccctgggctttcgatttatgaaagataagggaaagctggctctggacctatgcgaggtacgcatgattatcgagcctgagattgctgccctggctgcagaacgggcaacggaggaagagatcgaagaattagagaaagtagcaaaagaagtagaagtattatgtgagcaggagctgcagcatatggaaaaagatatagaatttcacggtctaattgccaagtgcagcaagaatactgtgatgcccaatatcatacctgtgatacagtcaggaatttctatttttatcaatattacagagtattccctaacccaggaaaccatacgcacacatagaatgatactcaacgcaattaaaaatcatgatccccaagaggcgagagcggccatgattgaacatctagtgagcaaccgggaaaagataaaaacgataatagcataaaagggggacgtgttctttctaaaaagaacacgtcccattttcgatccagggtgtcccaaaatgaaactgacctgtcccctttagtaatcttatacaaaaaggaacaacaaaaaccgacaaaagagataaaatggaagaacctcttgacccttaagtacagaagtgctactataaaaacagatacgacgtatgacgtctataaaaactcaattccaaatccattgcaaccgaaatgtgtaaatatagtgtgtctgtaaaaggagagataaaatgaaaatgagaagtcaggaattaaggaaagtagcaccggagttagatcccctgcgtctgggaaccggatggaaattggaagatttgtcaaaacctcagattatgattgagagtacttttggagacagtcacccgggaagcggtcatcttctggagttagttgaagaggcgagagaaggggtggccgaagccggaggtttcggtgccaggtattttacaacagatatctgtgacggtgaggctcaggggcacgacgggattaattactccctggcttcccgtgatatgattgccaatatgattgaaatccacgccaatgccactccttttgacggcggcgtttttattgcgagttgtgacaaggggatgccagctcatctgatgggggtgggaagagtgaatattccatccattgtagtcaccggtggggttatggatgcaggtcctgatctgctgacactggagcagattggaaaatataatgcaatgtgcgagcgaggtgagataacagaagaaaagcttacctattataagcaccatgcttgcccttcctgtggggcctgttcttttatggggactgcttctaccatgcagattatggcagaagccctgggacttatgctgcccggaagcgccctcatgcctgcgacaagcccggatctcagaacaatggccagggaagcaggcagacaggcagtatggctggcagagcacgatctgactccagataaaattgtcactatgaaatcctttgaaaatgcgatcatggtacatgctgctatctcgggttccacaaactctcttcttcatcttccagctatcgctagggagttcggaattgaaattgacggtgacacctttgaccgcctgcacagaggagcacattatttactaaatatccgccctgcgggagaatggcctgcccagtacttctattacgctggcggcgttcctactattatggaagagattaaggatatgctccacctggatgttatgactgtcacaggcaaaacactgggtgaaaatctggaagagcttaaaaagaacggattttatgataaatgcgatgagtatctggcggcagcaggactaaaacgggaggatgtaatccgtccctttgacaagcctttcggaacagacggaagtattgcaattctctacggaaatctctgcccggacggtgctgttgtaaagcacaccgtagtcccaaaggaaatgttccgggcaactttaaatgcccgtccctttgactgtgaggaagacgcgatccacgctgtgctcacacatgacattaaaccaggggatgctgtattcatccgctacgagggacctaagggcagcgggatgccggaaatgttctacaccacagaggccattgcatcggatgcagagcttggggcatctattgcactgctcacagacggaagattttcaggcgcctccaagggacctgccatcggacatatctcaccggaggcggcagagggcggtcccatcgctctggtagaggaaggggatatcattgaagtaaatatcccggaacgcatcctgcagatcgtagggattgcaggggagagaaaaacaccggaggagatcgatgctgtgttaaaagagcggaaaaataaatggtctcccaaaccttccaagtatacaaagggagtattaaaaatcttttcagaaagggccgcttctccaatgaagggcggatatatggagtagatactatgaacgtattcgatatcagcggaaaaaaagccattgttaccggaggcaccagaggccttggatacaaaatggccgagggttatcttgaggctggctgtgaagtggcgattgtgggaacctcagacagcgtttataacactgcacaggaattcagggacagaggtttctcatgccacggagtaaaaggaaatctgggtgagcgccgggaggtatacagagtatttcaggaatgcgttgagcttctcgggggagatctggatattcttctgacagcccacggcattcagcggcgccacagcgcggaagaatttccagtggaagaatgggatgaagtgataagtgtaaatctcacatccatctttatcctttgccaggaggcaggcaggataatgctgcaaaagggttatggaaaaattattacgattgcgtcaatgaactctttcttcggcggacagacgattccggcttacgcagctgcaaaagggggaatcgcacagcttacgaaggcacttaccaatgactgggtgggcagaggggtaaatgtcaatgccattgctccggggtatatggccacagagatgaataaagcccttcttgatccggccaatccaagatatgcttccattacagagagaatccctgcacataggtggggaaccggggatgatatgaaaggcactgctattttcctggcctctcacgccagtgattatgtgagcggggcgattatacctgtggatggagggtatttgggaaaataggaacgcatattggccctgccctctctggttcctgtcctgcctcctacgaccgtgggtaagtagcctatcccaatcctccaaactttagatagaaattaactattcttcaatatcaccctctccaccacatctgccactcgttcgcacctgtcgcagcatttttcaaggcagtcatacagggaggtccatgtgaaggcttctatggaagaagtggggttgatgtatagcctgtgcatggcttccatatacagccggtcgccgttttcttccaggcggttgatttcgattattttacttccgataacctttgatttgtgaaatacagagaattcttccatcatatccaacagagcctcacagcagcttaagattagatccgcaaacgaagcggcatcttctcttaagctagtgatatggaacatatataggcggagcattacatcctcgatgcagtcggtgacatcgtctatggtctcggacagttccatgatatcctctctgtcaatggggggcaggaattcccggtggagatgcttcatcatggtgtgtttggccaaatcggcggtgtgttcgatttgatgcatggcttccatctgccggggtaaatgttccgggttaaaattgtcaaagcatttttgaagcagagcagcagctttgcaggcatatgtaacattttctataaacatattaaaataattgttttcttttctcgacgccatagtcatttctcctttaaaaaatatacataaataatttagcaatgataaatccaatcagtccgcagcccggaaaggtgaggatccaggtcaataccatttctttcactacattccagttcactgcagacagtcgcttggctgcccccacccccatgatggcagtggtttttgtgtgggtagtggatacgggtatgcccgtaagtgaggagagcagaagacaggcagcacctgccagatccgcagcaaatccctgataggtttccagacggaccatatccatccccacagcctttatgatacggtatcccccgatggaagtgcctatggccatcaccaggctgcatagaatcatgagccacagaggaatctgaaaagaggttacggtttcctgtcccttagccaggaaaatccccagcataaatacgcccataaacttctgtccgtcctgggcaccgtgcataaaggccattgctgcaccccctccaatctgggccttccggaagaaaggagtggtgcgttccctgtcctgattcctgcagactgccgctaccagccttgcactgatccatccggaaagaaatcccagcagtgtggaaagcaaaagtccatataaaaccttaatccattctgcagggttaattccctgcagtcctccgtgaagtgcgatggcagatcctgacaggccggcaatgagggcgtggctctcactggtgggtatcccgaaccgccaggcggcagtggcccaggtgacaatggcaaccagagcggcgcaaagggctgtaagtgcttcctgtgtatttcccccgaaatctgccatatggtagatagtagatgctacactcgcgttcacagcagtcataacaaatacacccaggaagttacatacagcagccataagaatggcattccggggtttcatggatctggtggacacacaggttgctatggcattgggagcatcggtccacccatttactaaaacaacggcaagtgtaagcagaacagtaatgaccagcactggactttctgccagaaagctaaaaaactcactcagtgatattgtcacaaatattcctcccttgatcttgttcttatgtggtacgttttttaacatatcatatattttcatttctgcttagtcttatttcgctattttaacagcatcttaatggggaggaagaaagaaaaagagattgcaccccagacaaaagtcatgggtgcaatctctctatgattggcagggacagcggctatttctgtaccaaatgaacggcaaatccgccgatttccccgttcaggtatatggcatttatgcaatcccctttatatttggcggaatccatattaaaagtaaatccctgggattccagataatgcacagccctggccacagaattggtaccaatggcaatatggccgttggcgcccagataagggctcttcatagcttccacagcagtgcccgcgaagacagagctgttgccggtctttttggcaaaaccaaataacttttcaaaagaagatgccgtgagatcagcctcctcctcattctgacagttgatgcctacatgttttaattcaaagcccagcatagtctctaccgtttcccgggtaagacggcggatggtgtcaaagtttccggcgtcgatcaaatccccctttaccatccagcttccgccgcatgccagaatcttgggaaatgccaggtagctgttcagattctgtgcgctgatcccgcctgttggcatgaacatcatattcgtataaggggcagccatggctttaatcatattcagtcccccgcatgcctcggcggggaaaaattttactacatcaaggccaagtgagagggcctgttccacatcgctgggtgaggaagtgccgggggtgatgggaacccctttcttcttacagtatctgacaatgtcgggattcaggccggggctgacgataaaacgggcgcctgccgccactgcacgatccacctgctcagttgtcagtacagtgccagcgccgatcagcatttccgggaaagcgttcgccataatccggatggattcttcggcagcatccgtgcggaaggtgacttcggcacagggcaggcctccttcgcagagggcctttgccagaggaagggcgtctttagcgtctttcagaaccactacaggaacaataccaattttttgaatttgctctaaaacgttgtgcatttttttctcctttgtttcataatacaaaactaagttccacgatatagtatttatagtagaattatactacacaaggaaggaatgtcaagcggatgggagaaatatttacattctaatcataacgtgttacaatatgtttcaatctaaggaaacacataaagatgcatagataagctgcggaatcaggagataaaatatggcagaagaaaagaatcccatccaggtagcggaccggctgtttttggtgatggagacattggcagagacagggccggctgggctgattgacttaagcaacaggctaaaccttcataaaagtacggtacacaggctcttaaactcactgatctatatgggctatgcccggcaggatcaggagacaggaaaatacagtcttacctttaaaattctggaaatatccaatagggtcctgaacaaggtagatgtgctggaaattgcccgaccacatcttaagcgactgatgcagcagaccggtgagaccgtacattttgttcagatagacgggacagaggcggtgtacattgataaagtagaatctcaccagaactctgtgcggatggtgtcaaaggtgggcagccgtatccctctctactgctccggcgtaggcaaggccatgctggcaaccatgaagccggaggctgttaaaaagttgtgggaggccagtgatattcacaggctcactcctcataccattacagtttacagcagctttctgcaagatctggaagacataagaaaaagaggctatgccctggataatgaggaaaatgaagagggagtgcgctgtattgctgcctgtctaactgactttaaaggcaaggcaaagtatgcttttagtatctcggctccggtgaaccgaatgacggatgagagaattacagagctttccggttatgtgctggagatgaaacagcagatgattcaggaaatgtcatagagaaagagggcgttaatatgacggaagaactgccgctgaaaaaacaaatcgtttctattccaaatctgatgggttatttcaggatactgctgatccctgtcattgtctggagatatctgaccgcagattctataggagattaccgcatagccgcggtgattataggaatctcagggattactgactttttagatggatttgtggcgagaaagtttcatatggtaaccaaactgggaaaggcagtggaccccatagcggacaagttaacccagggagccattgttctatccctctctttccggtttcccctgatgacagtactggcagtcctctttgtaataaaagagggatttatggggattatgggaatcctgatgttaagaaagggcaggatgctaaacggggcaatgtggtttggtaaggtgtgcacagccgtgctgtatctggtcatgtttttgttgatactgatccccaatattccaatgacgggggcaaatatccttatcggaatcagcggtgcgctgatgctgctgtcatttcttctgtatattcccgtatttggcaagatgaacagggaaggcgggagtcagaattgagaaagaaattaaaaatactgctgattcttttgctgattgtactgctgtatgagattgtaggggcttgtattccatttatacatacaaaaaaagtaaagaaggcgtattctgaaaaattgaatacagagtcttttacacaggtatcctcaggcagtgactgggcacagattgccgagacaaatgaagaggcactggacgtacgcctggccatgtttgaagaggcagaggaaagcattgtgatctctacctttgatatccgtccgggaaaaagcacatcggatatctttgccttcctgttggcggcggcggatcggggggtaaaagttcaggtaattgtagacggtctgtacggaatgcttcatatggatggagaggacatttttcaggctgcggggagccaccctaatctggagatccggtactataataagcctaatcttttgaagccgtggacaatcaacggaagaatgcatgataaatatgtattgattgacaacaagctgcttcttatgggcggcagaaatatgttcgattattttataggaaattatccccaaaagagcaagggatatgacagagaagttctcttgtatcatcaggagatagagggggagacctcctcagaaaacgtaattctggaagtgagagagtattttcagaagatttggagtcaggaatgtacaagaccggtattcgaggggaagtcccgggaagatgaggagacggccaaagaaataaaaaaactttcccggcgctatgaaaaattgtctggaacacgtgggaccgagacagacatcgactggacgaaagaacttgtgcccgtgaaaaaagcgacctttgtgacaaaccccacgaatataggaccaaaggaaccctgggtatggtataccttgcagcagctgatgctggaggctgacagcagagtagttattcagacgccttatgcagtattttctcaggatatgtatgagggaatggaacagcttgcaaaaactgtggaaaagacagacatgctcattaattccacagcagtcggcgataattttatggcctcctcggactatacccataataagggaaaggtactggacacgggggtaagggtgcatgagtattttggggagcactcctgccacggcaaatccatactcatagacggcgatctttctgtggttgggtcttataactttgatatgagaagtacctatgtagataccgagactatgctggtgctctacggagaagagttcaattctctgctggaggaaaagatggataagctgcaggcggagtctctggaggttaccggaccagacacatatgctgagaaagaagggatcagccaaaaagaactctctacgggaaaggctcgtctgttctggattacttccaagctgattcagatggtgcgctatctggcctgataaaatatgatcataacagacaaaatgctgtccgcagccgaggtattggccgcggacagcattttttattacttaagattagagataaccctttttatccctgattgtactttttcactgcatcggccagagccaccacattttccgggggaactccgggaactatattgtggatggtgttaaatacaaatccgccccctttgccgaagattcggcagcactccagggcttcgtcaaatacctgctgataggtgcccattgggagggttctctgggtgttaatacctcccccccagtatacgattctgtctccgtagagctttttgatttcctttcggtccatgttctcagcggtccactgtacagggttcaggcagtcaaagcctgcgtcgatgagttctggaatcagatccttgatgcttccgcagcagtgcttaaaggtcttccaggaggtatgctcatggatccaacggttgaccttctgataatacggcttatacatttcattgaaggtggcattgctgcagaaagggcctttttgggtcccgaagtcagtgccgcagatataagcgacctggatggtttctcccagagccttatgcattttttccagattttcgatcgcacagcgtgcctggtactcaaagatttcatggagaatctcctgccttgatgcaatggatacgtaccactctgtaatatcccggatcccttttggttccctaagcatgggtcctgggaccagggcaatatcgccgaaagcagtgcccccaagattgcccataattacgtcggaagaagcttcatacctggaacgctggagggccagccagtccagatcctcctgtgaaatgggaccgaattcttccaaattgtcctcaaggcggtaatcgtcctcatcaaacgcaggggtacgttctgtattgtcaaagaaaacccctgttctgggcatacgtcccgctgcttcgtaacgggtatccccccaggcatatatgagagtatctcctttggcatccgtagtcgtgacaaaatccttgggtacaaggacatcctgtccccatggagttctccactccttatagtcgtcttttaccgggaatcccagcatactgccggctccccagcatggctgtgtctgaattcccagggcttccctgatatcctcgtccagaattcccagcatctgcaccggctctaatatcttaatgggacgcttctccagtcccagatactcccggacctgctccaaaacaatgcagtgaatcccagtggtaggcattccgccgatatcaaggaggagcgggccttcctcgtggttgactgccagctttaatttttcctttcccgtcataattcttgcctctctctttcattcatttttctctgtgttttagtgaaaacacaatactatgtatttcatgaatcgtttcataaagccatgatagtatacccatattgttttgtcaagcgttttttccagaaaggcaaaagtaagagaggacagggcagattccttggaaatcttccctgtcctctcttactgaggccgtatcacatctctattcttttggttcttttcctctgcctttgctattttctcggggcagttcatcaattaatttttcaattagctgctttttcacgtatacgtcaaagctgagaagactgataaaggaaaacagctgaagaaagggctgctcatcctcagggcactgggaaaaggaatcctttgccaggttaaacctgcgggtaatatccttcttcaggggcacaatctgatccatctccagctttacgatctcgttgtagatggcagtcaggtcaaagtcttcgtcggtatcaaaatatttgccggtaatgggctggagcagtgtctgaatatcattgatcgaaagtatatttttaaaataatagataaaaatcaaaagaaacatgtgttccttggagtactttttctttaccgggggcggaagcaggttattcttggcataattattaatcatagttttggttagaatcttatcttcaggatagcgcttggaggattgcagattcttttccatgaatgtagttacctgatccatatataaatcaatgccggggatatcttccggtttaatatagtcaatccgggagatactggccagtatgctgtttaacatatcttctgtattaattgtcatttcatcacctctgctctctattatatagttttcaatactatttgtaaataagtgatttgtttaaatttatgcagttgaaattcaaaatgataaatggtagtatcagtgcatgaaacgatatatggaggtagataagatgaaggagcagtatgagatcctaaaaaaggtgggaaatatccaacagacagcggcagtgcgaaagatagaatttcaggaggggagagccagaggaatgcaggggtatgacattaagaacggtcccctccgttttcaggtaatgggagacaagtgcctggatatcagcgaattatcctacaaggggatcaatctttcgtttcttgcaaagtcgggtcttatagggagaatggactatgatacccacggggaagagggaacatcaaacattatgggaggccttttgtttacctgcgggctggagaatacctgtcttgcctgcagagagggggaggcctattatcccatgcacggaagagtccgctcggcccccggagaacagctgtgcgcaagcgccgggtgggaagagggaaagtaccggatagctgttagcggacagatgcgggagggaaagctcttcggcaaccatatgtgccttagccggagaattgaaactgtatatggggagaggaagattttgattaccgacgagattgagaatctggcgtatcgggaggaacctatgatggttctgtatcactttaacatgggttatccgttcctggatgagggggccagggtgatacttcccacgaaaaaggtcaccccaagagatgaggcagccatgaaacaacaggaactctgggaccagatggaggcgcctgcagataatgagccggagcgggtgtatctgcatgaattggcggaggacagggagggaaatacctttgcctgccttatcaatgaaaggctgcagctgggcttaaggatccgtttttccagaaagtaccttccctactttgtacagtggaaatccctagcctcaggggactatgtgatggggctggaaccaaccaattccggggtatatggaaggtcccgggagggagagcacctacataccatgcagccctttgaaaaagagaagattcagttttccatagagatccttgagggggaagaagaactgaaagccgcttcggatgaagcacaattgcttcttcaaaggtaagccaaatacagaggaaacagggcagttattgtgcagatttgccaatagcagccctttgtttttgaaataaacaaacaaagttgtaaaaatagcttgtcagataaaataatcagtgctatatttataataaatcatgaaacgtttcatgaaagacaaaactatgattgcaaagggaaaggagaaacaacatgaaaaagttagcagcagttttagcagcatctgtgctgtgcctgtctatgtttgcaggatgcggggacaccaaagaggagacaagcacgtccgcttcagacacgaaggaggcggacggcgaatccacaggggaaaaaagcgaaggggggatggtcggcgtctccatgcctacacagtctctgcagcgctggaatcaggatggagagaatctgaacaaatttcttacggaaatgggatatgaggtagatcttcagtatgcagacaacgaagtacagcagcaggtttcccagattgagaatatgatcacaaaaggagcgaaggtgctcataattgcaccggtagacggcagcgctctatcggcggtattagcagaagcgcatgatgcgggcattaaagtgattgcccatgaccgttttattacagagacagagaatgtagactgcgtgggaacctttgacaacaataaggtcggagctcttcagggacagtatatcgcagatgctttggatctggagcatgcagatgggccatttaatctggaaattgttgcaggttccctggatgacgacaatgcatcttactttttgggcggggcaatggagatccttcagccatacatagacagcggcaagctggttgtaagatccgggcagaccacgagagaacagtgcgcaacggatgcatggcagaccgatgtagcccaggccagaatggataatattctgactgcatattacacagcagagaaactagatgcggtgctctgctccaatgactctactgcactgggtgctgaatctgcattaaaatcggccggatatggctcaggggatcttccatttcctgtgattaccggacaggactgcgatacagcaaatgtgaaggctatcattgccggggaacagtctatgtcagttttcaaggatacaagagcgctggccaagcaggtagcatctatggctcaggcctttatgaacggagaagagcctgagtacaacgatactactacttacaataacggggcaaaagtagttcctgcctatgccctggagccgattgtagtaacaaaggataattatcaggaaaaactggtcgattccggttattatacagaagctgaattaaagtaagcatagaagggcggtgcatagaagtaccgcctttccatatacaggagaacacgggaggcaggcatgacaaaggtattattggaaatgcagaatatagtaaaggaatttccgggtgtccgcgcgttggataatgtaaatatcaaagtccgggaaaaaactatccatgctcttgtgggcgagaacggggcaggaaaatccacgctcatgaaggttctgagcggtgtacatccccacggctcatatgaaggaaagattatatgggacgggggtgaatgccggttcagagacatccgggaaagtgaaaaaaaggggattgtaattatccatcaggagctggcgctgattccgcagctctccatcatggaaaacctttttctgggaaatgaacagcagaagaaaggagtgattgactgggagaaatgccgttttgaggccatacgactgatggaactggtgggtctgaaggaaaaaccagagactctgatcaatcagatcggtgtggggaagcagcagctggtagagatagccaaggctctggcgaaaaaagttcggctgcttatactggacgagcctacggcagctctgaatgaggaagaaagtgaacgtctgctgaatcttatcctccgtctgagagatgagcacggtatgaccggcattattatttcccacaagctggcggaggtgacaaaggttgcggatgatattactgtgctcagagacgggagcaccgtggaaacgctctgcgccgcttcggatctcatcacggaagagcggattattcagggaatggttggacgggagctgacgaacctgtatccggcaagagactcagggattggagagatccggtttgagatcagggattgggtggtatactccgaagaatataaggacaaggtcatgattgaccatgtaaatatgaagataaaaagaggcgaggtggtaggcatcgcaggtctcatgggcgccggcaggacagaattcgccatgagcgtgttcggcagaagctttggatcaaaagtacagggcagcgtagtaaaggatggaacagaaatcaacgtaagcacggtctcttctgccatagagaatggaattgcctacctgacggaagacagaaaagcactgggattgctgctccaggagagcattaagggaaatatatccctgccaagcctgcacaaactggcccgcaaaggggtggtaaatcaaaatgaagaaattaaggtggctgaagaatatatagaaaggctggggattaaggcacccgggatcttccagacaaccaataacctttccgggggaaaccagcagaaggtgcttttggccagatggatttacgcaaatcccgatcttctgattctggacgaacctaccagaggcatcgatgtgggggcaaagtatgagatatatcacattataaatgagcttgccgcacagggaaagtgcattctggtcatctcctcagagcttccggaggtactgggaaccagcgacagaatttatgttatgaatgagggcaggatagccggtgaatttaccagggaagaggcaacccaggaaaagattatgaaatcaattttacagagcaacaggaggaactgagatgaatcagggaagaaaatttcatttggatttaaaaaaatatgggatggtgattgccctggtagtaattaccgcactgtttcaatggctgacagaaggggtgcttttggcgcctatgaatatatcaaaattacttatgcagaatggatacatattaatcctggcaatcggcatgctgcccattattctaaccggagatattgatttgtctgtgggatccgtggttgccctggtaggggctgtgaccagcaagctcctggtaggagagacaaggatgccggtggctttggggattgccgtcggacttctggtagggattcttatcgggatatggcatggattctggatcgcttatgtaaaggtacctgcttttatcgcaacgcttgcgggtatgctgtttttcagaggtcttaccctggtaatcacccagggaaaaaccatcggtccctatcccgacgcataccagtacatcgcccaggcttaccttcctgatgtgggaggcacttcccggatacacctgactaccattctgatcggggctgcactgattgttgttttcctgctcacacagctgcagaagagaaaacgggagatatcctatggatttgcggtatcaggcagcggggtatataccctgaagcttgtgtttatggcaggattgattgcctttgccacttattggtttaccagattcaagggagcaccagtgattctgatgattcttgggattcttacttttatctattcttttgtaacagagaagaccgttctggggcggcatatctatgccctgggaggaaatgagagggccactgccctgtccggaatcaaaacaaaacgggtgaaatttatgacctttgtaaatatgggacttcttgcagcctttgcaggcatcgtatactctgccagaatcaactgtgccaatcctaccgccggcgacggatttgagctggatgccattgccgcctgctatatcggcggcgcttccgcttccggaggggtggggagaatcagcggcgctattgtgggcggtctggttatgggtgtcctgaataacggtatgtctatcatcggcgtggggacagattggcagaaatccatcaagggtctggttctattggcagccgtggtttttgatattgtaaatcagaccaagaaaaaatagcaaaccttgcaggcggtgaacctgatgtgataagatgtaactgttcacagtacggtctgaaaggaatgctgtgaacggcacatttcattacccaatcagaatgtcgcagtgtttatcactactttatatagaaataaaagcagcagaaaagagtaaggagtacagatatggccacgattaaggaagttgcaaagcttgcaaatgtatctttggggacggtatccaacgtattaaatggaaagacccagaacgaagagctgattcagagggtggaagcggcaatggagcagctttcctaccgtccggacgccaatgccagaagcttgaaaaatacacggagcggtgtcataggggtgatcttaccagatgttctgcaaagggatctggcagactttttactcgagctggaacgtcttttgagggaaaaaggatatcatattctggtgaagttcagcagaaataaccgtctgattgagaagcagtgcattgaggcttttctggaacaatgcgtggacgggattatcctgtattctgtacagcgcagaaagccggtgacccttctggaaaagtctaatgtacccgcagtgattatcagccgaagtgagacggaacagtttgccggggataagataatcattgattacagccgggcatttacgcaggctatggaagagtgtgcggccagcgattgggagagggtaggtctgatcctggaaaaggatcttctccaggaagaagatttgtcgggaatttaccaccgcttttatccggaaaacgacttaatcaaagtggtagatgggagccaggagcgggggttccaggcatttttccaattgtataccgcagattcgaatctggactgcgtaatcgcgggaagtgccaccatagcaaacggcgtaaagcgggccatggacatactggaggtaccagggattcctgtgatggtcatgaaagagagcagctggatggaggatgccgggtactttgccgcccagcttaccgtatctcctaaggtcatggcacagaagacggcggagcgtcttcttgaggctgtgagaaggcctcatctgcatgagaatatgactacatttctccatgcagactatgataagatagagcctgctactacaggaatcaaaaaggcagagcatgatctgagatttgctatgtatgactgctcctcctccagaagcctgcagatgctatccaggatttacgagaaagagagcggcagaaaaattatctttgatctctatccctatggagagttagaggagctcctctatcagaagtcgggggaaaaggacagctattacgatgggtttatgatggacattacctggctggaaggtctcatagagagcggaggcgtaaaaaatctggatgcgctctgggcggaccacagaggctatttcgacgggtttatcgacggggtggtaaaggagtacggtatgtatgtggaatctctctatgcaatcccatttatgtccggcgccctcctgctgttttaccagaaggatttattcgaaaaccgggccctgcagatgcggtttaaaagaaaatataaggaagatcttcttcccccacagacctgggcgcagtttaatctgattgcagagttctttaccaaagaatacaatccccagtcaccggtgatgtacggagcctctcttcccagaggagagaatgtctatactgccctaagcttcctgtgccacctgtggtcttacggaagccgggtatttgacgaaaacggagaggtgagcatcaacgagagcaatgcggcggcagcccttagaaatctggttctttcctataaatatacctctgggaagcagctttgctcctggaatgaggtggcagatgaatttgcccggggaaacagcgctatggtactcctctatgactccgatgccggggatattaataattatacgaaatcaaaagtggccgggaacctggggtattcccagatccccgggggagctcctgttctggggggctggagtctgggcctgaaccgttacggcacccaccaggaggatgctcaaaattttcttctgtgggcctgcggcagccagaatgggattcccctctctcttcttgggggctcaaccttgaggaaagaatattacagaagggcagatctggagaacctggagccctggaaatgcctgatcctaaagtgctatgaacagagtaaaaagcgttttatgcctgagatactggacgaaagccggtggaagaataatatctatacctctctgattcccaaagagattgagcgggttctgaagggggagatcagtgagcaggaagccctccggaatatggagacaaacatccgcaggcttctggagcggtaagaaaagcggcaggacaaaaagcctggagaatccaaaggattccccgggctttttgtcctgccgcaatagggattccccggaacttctggatctcaggcgggggctgtgctataatgaaaattgcctgtttagcaggatggatgattaggatagatggagaatgcatatgagtatatacgatacactgaacagccagcagcaggaggcggtttttcggacagaggggccggtgctgatcctggcgggagcaggttccggcaagaccagagtgctgacgcaccggattgcgtacctgatagaagaaaagggagtcaacccgtggaatatcatggcgatcacctttaccaataaagctgcggaggagatgcgggaccgtgtggacaagctggtgggcttcggcgccgagagcgtctgggtgagtacctttcattccagctgtgtgagaatcctgagacgatacattgaccgcctgggatacagcaataattttacaatctatgacaccgatgaccagaagaccctgatgaaggatatctgcaagcggctgaatattgatacaaaagtttacaaagagcgggcgattatgagcgccgtctcctccgcaaaggatgagctcataagccctgaggaatatgagctcaacactatgggggatttcggaaagaaaaagattgcccttgcctacaaggaataccagaagcagctgaaaaagaacaatgctcttgactttgatgatctcattgtaaagaccgtggaacttttccaggcctgccccgacgtgctggagtcttaccaggaacggttccggtatctgatggtggatgaataccaggataccaatactgcacagtttaagtttgtcagccttctggcctccaaatatcagaatctgtgcgtggtgggcgacgacgatcagtccatctacaaattccggggcgctaatataggaaatattctgggctatgaaaaggtttttcccaatgccaaggtgattaaactggaacaaaattaccgttccacccaaaatattctgaattctgccaatgaggtaatccgaaacaatctgggacgaaagagcaagactctctggacggacaacgaagaaggagcgcttctgcatttcaggcagtttatgaacggctttgaagaggcagaatatatcactggggatatcagccaaaaggtccgtgagggagaatgcagctacaaagactgtgctatactataccggaccaatgcccagtcccgtttgtttgaagaaaaatttctcatgtccaatataccttataaaatggtgggaggagtaaacttctatgccagaaaagaaatcaaggatctcctggcatacctgaaaaccgttgacaatgccagagacgatattgccgtcagaaggattatcaatgtgccgaaacgcggcatcggcctgacaacaatcacaagggtccaggattatgcagatgccaatggcatcagcttttacgacgcactgcgcactgcggatgagattccttctctgggaagaggcgcggctaaaattcgtccgttcgtcacctttatccaaagtctcagaagcaaggcagagtacctctccgtcacagaactgttggatgatattatagaagaaaccgggtatgtagcggaccttaaagccgaagacaccgacgaggcaaatgctagaattgagaatatcgatgaattgattaccaaggtagttacctatgaggagggaaccgatacgcccagccttggggaattcctggaggaggttgcgctgattgcggacatcgatactgtggatactaacagcgacagggttttgatgatgaccttacatagcgcaaaaggactggaatttccttatgtctatatggcgggcatggaggatggtatcttccccagctatatgacaattgtggcagacgatcccacggaaatcgaagaggaacgccgtctgtgctacgtgggaattacccgggcgatgaaggatctaacactgacttgcgcccagcagcgtatgattcgtggcgaaacgcagtataataaagtatcacggtttatccgtgagattccaagagaactggtggatatgggacagagcttccaggaaaggaaggtaaaagatatcccgctgccctccggattccagcagatgcgccaggccttcaaaagtcaggccttccagccccggcagtttgaagtaaaaaaatctgagggactgagctacggcgtaggagatacggtaaaacacattaagttcggcgtggggatcgtggaaaatatcgcagaaggcggaaaggattacgaggttaccgtcaattttgataaggcaggagtgaaaaaaatgttcgcttccttcgccaaactcaagaaaatctaaaattttcagaaatgatggtaaaatcccacatatggtggtataataactctaacgacaagagaggatggtgtatataatgaataaagtggaagattttcttgcagcattacagaaaaaagaagaagaaaaaaataaaaatacggttctctggatattggcaattataggtgctgtagcagcagttgcgggaatcgcatatgcagtatatcgtttctttacacctgattatttggaagatttcgaagaggattttgatgatgacttcgatgactatttcgaagatgaggatgacgaagaagagtaagatatgataataatagctccggtgcagacctgtgccggggctatcgttctgtcaggagataataagataacgagaagtaaggagagagtctgtgagaaaaggtgatatttgtgaaggaatcattgaaaaaatagaatttcccaacaagggaaaagtggtaattgacggccagaccataaccgtcaaaaatgggatcccgggccagaagatccggttcgccataaataaaaagagaaagaataaaatggaggggcgtctcctggaagtgctggagaaatcccccctggaaaccagggagcctgtgtgcagtatcttccctgcctgcggaggctgtatgtaccagaccatgtcctatgaaaatcagctggaaatgaaagaaaaacaggtgaaagagcttttggacgaggccatccaaaaagggggacaaaccgatgaaaacggccagccggactatgtatttgagggcgtcaaaggcagtcctcaggaattcggctaccggaataagatggaattttccttcggagatgagtacaaagacggccctctgtcactcggcctacataagaaggggagcacttatgatgttctgacagcttcagattgtaagctggtgcacgaggactacaccagaattctaatgtgtatcctgtcttattttcaggagcgaactgtggggtattacaaaaaaatgcagcatgtgggctatctgcgccacctgctcctgcgcagggctcagacaaccggtgagattctggtgaatctggtaaccaccagccaggaagaacacgatttgacagaacttgtggaacaagtcctcgggcttccgctggagggcaggatcgtgggatttctgcacattataaacgactctctgtctgatgtggtccagagcgatgagaccaggattctgtatggaaaggactatttttacgaagagattctggggctgaagttcaaggtgacacccttttccttttttcagcccaattcctatggggccgaagtactctaccgtacagcccgtgagtttataggagataccaaggatatgactgtgtttgacctgtacagcggaacaggaacaatttcacagatcctctccccggtagccaaagaagtaattggagtcgagattgtggaagaagcggtggaggcggcgaaagaaaatgcggcgctgaacggcattaccaattgccggtttatcgccggggatgtgctgaaagtgctggatgaaattgaggagaagccagacatcatcgtactagacccccccagggacggagtgcatccgaaggccttgaagaagatcatagagtacggggtggacagacttgtgtatatttcctgtaagccgagcagtttggcgagggatttggaagtgtttttggagaatgggtatcgggtggagagatgtggaggggtggatcaattttgtcagacggtgcatacggagaccattgtacttttgtcccacaaatcaccagacagtcatatcaacgtaaagattgaatttggagaaggtgaagggaaagtacctttagacgcgattgcagagcgtgcaaagaaatattagccaaagccgaaaatcacatatacaatgatacaggaatatgttgaaaagaaatatggatttaaggtacatactgcttatattgcggaggtaaggaggtctttaggtctgcccctgtatgatgctcctaatgcgacagaggaattgaagcaaccgagaaaatgtccaccaaaagaacagatagaagcaataacagatacacttaaatattttggagtgatttgatggttgaaaatatatttcagattacagaaccaatagtttaaatacatcaaaatgcctatgagatttatttgcccttggttgatgatttgtgcagtagaacagtatcagaaaatgaactatcacatttgcttgattatttactggattttgcgtgcgatgaaaaaatactggaattgtataaaatggtatgcagaaaatatttatatgtttatccgggttgcgttaaattccatattgaagcatattggggaaggtgaaagtaaagaagtaaaggattttaaataatgtgtcagtaacaataagaaaatactgggtatagttgaggggggtacaatggtaaaggtaattaaagaaacaattcatgctaatgggataaatatcggaatttatacgcaggattttgaaaatgaatttatttcattaacagatattgcaaggtataaaagtgatgacccaacagcggttattcaaaattggatgagaaatcgagatgtgatagaatttctgggattatgggaaaggcttcataatccagattttaaacccctcgaattcgaggggtttagaaagcaggccggagcaaacgcatttacaatgtcgccaaagaagtggatagatgctacagatgcaattggtattgtttcaaaagcaggacgttatggtggaacatatgctcatagtgatattgctatgtcttttgcaacttggatttcacctgaatttcaattgtatattatgaaagactacaggagattaaagaccgatgagaatagtcgattatctttgagctggaatttgaatagagaaatttctaaattgaattacaggatacatacggatgcgattaaggacaatttgattccgccagaattaacgcctgcacaggtggcttatacttatgctaatgaagcagatatgttgaacgttgtcttgtttggaaagacagcgaagcaatggaaagatgaaaatccaacggtgaaaggaaatatgcgggacatggcaacgctgaatcaattgctagtgcttgcaaatttggaaagttataatgccgttttgattaatcaaggaaagaaacaaaaggagagaatggaattgcttcggcagttggcggtacaacagttgcagactttgggggcagtaggtttaaataatttgctcaaattagaagcggagacaaagaagagttaaataggcaaatgaaatagatttgggtattagaaatattagttggatatgataatacaaaaaattcagtaaatgtcaaaagaggataatagattaggagcattaaagatatgttgcactcaaacgaaagaatggatttaataactgaatatatgacatcatatgaagaaaaaattaaaatggcaaataaaaacggattatttgatgctgctaaaatgtttgagttatttgctgttgaggtgtgtattgtttggtttggacaaaagtttagtaatttgaatactgagagagcaacgtatccatatgtagatttaatatcagaaaatagagaacttttagtacaagtaagtactgctcaagatgtaccaacaaaaataaaaagcacattggaaaaaataagggattcaaaagataaaaaatattcagctttaaagaatatcgtgttttttgtactgagtaataatagtattgataagataaaagaatatagtggtgataatcaaattgggagtatctcatttactattaaagataatttgattactacaaacgatattataactaaagcgcaaaatgaccttaattttcagaaaaaactatataaggtgttaaaagatgagtttgacaactttaatattaatatcagagagtttaaaggtgcattggaacttagtgcttcaggattaagagctatagagggattaattaacggagaatatgaaatcgatagaaatgaatttcttaaaactataataaaagacaatgagcgatatatttcaatacaaggtggtgctggtagcggtaaatcggttttatgtaaaaaatatgttgaaaatcaagaattggttttatatgctcgtgccgaaagattcgtggaagaaagtcatatcgataacatttgggattgttgtatccaagatgttttagagtgtcttaatggaaagaaactaatcttctttattgatgcccttgagtttattgcggactgtgcaaaaacaaaatttgaattattacagtatttatatgatatggcgacgaagtatcaatatgtgtatatagtaacttcatgtagaacaagtgataaaaatgcttttataaaactagaaacaaatttctcaataaaaatttatgaagttggagatataacagaaaatgaacttgctttgattatgaagaaatatccgcttatacataaaatgtataagatgaattcatatgtggatttattaaaatcgcctttttatataaatttgattattagtaattcaatagatattgatgatatcagggatgaaaatactttaagagaatacatttggagaaatataatatgtttggagaaaaagtccccaatatatagagtactcagtggcaaagttattgaaacagttgagaaaattgtattcgaaagagctaaaaaatttttgttgggtattcataaagacgatatagacagagacgtaatgcatgcactgttgtcggagggggtagtcgcccaacaaggagaatatattagactaaagtatgatattttcgaagatatttgctttgaacactattttgataaagcgtttgatttgtgtaaaggaaagtataagaatttttacgatgaaatagaaaatctcgggcgttgtgtgtatagacgatatcagatttggatttcgaataaaatgtttatacaagtaaatagagataaatttttatatagtcttaccttctccgatgaaattcctcaaagttggaaaaggcaaacagaaattggaattgttaaatcaaggttttgcgataattattttgaagagcaagggcttgaaattttagaacaaggtatactacaggaatttgtgaatagtattaatttatttgcatttgaaggcaagttaatacatattgggcaagggttgccacaaatcacattaactcctattggtaatggaaggccatgcattattcgacttttgaaaaatgaagaaatttacaaacgggatatcatcgggagagatgatattattaagctgtgtttagattatgcgaagcaagagaatagagtatctatagttgcttctgatgcgtgtactatgatggaatattatgtggaatattcaatgcaggaatctggaaaagaaagctattataaaatcatagatgaaatatcatcttgtttggaagcgctttatcgaatggcagataattcagaagattggttaaaaagtttttttgatttattaatttgtaattatacaaatggagacacaaaaaacaggcgaaaatcagaagatattatggaatggacattgaagaatgcttatcctgccttggtaatcagattggcaagtgaattgtgttcgatagctgacacattatggttatgtgtaagtgtggatactgaggaattgaatttttataatattggtagattgtctaaggggcctgaatatggattaggtaaagaggctgaacattatgatttttcatatagaacagtgtacgataatgtgtttttgtggaatttgtttcgattgaattttgaagtgggatttcattggacaattggatttataaataaagtaatatctaaatatgcagccaatgctcctgaaaatgtaatacaaatcaaagtaagaattaatgagagtaatacgctaaaggaatactggggaaatggaaatatgtggcttgcagggattagagaccacaatgtccctacgataataggagatgttattttttgtcttaaagaagctataataaatagtttggagacttggaaaaaggagcaggaattcttgattgggttttcgaattatgtaaaagaaactatctatgcaaaatcaaataatatagcattgcttacaattattgagagtataggaatccattttgaaaaagaattaccaggctatgctttggacttagcgacaagtatagaacttgttcattgggatatatcaagatatgcgttgttccataaaaatccgacagaagaattgcttgaaaggcaaatttttaagaccatgggaatacctgaacttaaagatagatatgaattggataaaaaatgtaatttaagtatacaagaatatgtatctcatgcacaaatattttttgattcgattatacaggataagagctatgggattttagactatttatattcgatcataaaaaatgatgaagagaatgcacgggattatttacagattcagaaaatggatatgcgtggtgcaaaagcaactaagatagccgaaaacgtaattatgttagaacccaaagtatctggggaagcggaaaaaattgttttaaaacaagaaaaaatcaatgaacctgagcagaaattaaatgtagcgattaaaaagtgcaatgataatatggtatctggacagattgatttgctatcaattcttgatgcaatttacgttgttttagagttgatgaaaaatacagatgtggcattccaatatgaaaatcttttgatacttcttattgctggtgcaatcaatcatccagagttggagaaagaaaaaagggagaaattttgcacaatatggattgacggaatagagaagttgttttctaatggaagctttttaggggatactgcacttgtgccggttttattgaatcaattggaaaatgacattgctatcgagataaaaaataagataaagaaaataatgttggactgtgtgatgcataggaagcaccatggagttattgctgaaataactaaatatatgaagaaatatttggctaatcatgatattttggcgcaagcggtatttaatacaattattaagttagctgaagatcagatggagcatcaaaaatacaatgctaattatatgatagcgagcaagaaaaaaactgattttatatttagccctaatatgcaaccgaaattgtcagttgtagactgttatatcaaagatgatgatggaaacacttatgttggtcacgaggatgagataattattaagtatctgtttcaggaagaatcttttaaggtaaacacttttgatatgagtaaatatgatatatcaacgttatgctatgttgcaaattgcggcctaaattttattaacgaatcttttagaatggttattcataatatcttattatgtgtgattgatatttggaaatatagtgaaaaaaatcacaatactcatgttatttttgatgcttaccaagaatatgaaattgttgaactgtttcagagagaaatggtacaagctcaaagtgacgcaaaaatggcaatagatatactatttgaaggaatcgatttttcgaaatttacatcagatactattgagttctatcaagatatttttgggaatttcttgtgtgaattttttgattcatatgttgacttgaaaagaagaaatttgtgtaaaaagaaaatatcatatattgagaataaagtaaatgctattgatgaagaatatgtacgaatacagttatacaaatctcttatgttttctgtaactagatattgcgtgggagactggagcaaaattaaaacaaattattcgtatgcggataagcaatttttgaataagcaatttacaaagtatggaaaatatcatatcaaagaactgttgagaacgacttatcaaatgcatatagatgaattattgccggaaatattaatttcaattaaaaatagttttcaaaatgcgaaagctgagagaaataaatttaaaaagtcagtgaaagaacaagaagttgtaatacaattgattattcttaagtcctttattacacatagtgataaaattaaacaggatcaagaacttattgaagcatatgaagatatactcgaaatattgattgatttaaattatgagtatgcagcagttattttggatgagtttaggattcattaatgtgtagagaatactattcatttaaattaaaagatgtatgtccgctaaataatatttaaggatggtagagtcaaggtttgattttgtgggaatctggtaataccgtggaaagcattgtcctgttgcaaaagagtgttaaatgatgactaggtgagatcggatagttgtcgtgtggtgaggcgtgaaggcttttagcttttgcgccttttccttatggatgagatggggttgggtattttcaggggtgttctgggattgtggaagaaatgggttaaggaagtagaagcggcgataaccttatcaggagcaatggggcaagaagaaagcagaaacttgagtgagaatatacagtggtgcattaaaagaatatttgaggaagggttatttagccactacaaacattttatgaggtatcggagtgtggaaggggaatttgtaattgtcccggagcaggctaaaatagtacgttaaatttttgaattatatttaaaagatatttggaggaaagtgttatagaaacagtaagaggtaaaacggtatggactcaaatgtaatccagcaaatgatgaagcatgaaaagcataagggaaatatgatgctttagaaaatatttaccgaggattatctgaatggtgtacgaaagaaaaaggtaggacagagtaccagatattatgtgaaaggaagccatccggtcattatttctccggagatgtttgataagatgcaggaggaaatgcttaataaagccagactgctcagaacagctgatggcaaccagattagcggtggaaaccgatatagcagctaatatttgcttagtaatttattagcatgtagggattgtggagaggattcaggcgtagaacggagcgtgggaatattatatggaaatgtgggagaaggagggaaaaaggaagggctgagtgctaaaattcacctacattgaacgagcaatatgtaagagatatgctgagaaaagctgtgtaatggggaatatgatgaaaatgtcctaaaagatagagtaaagagaatagatgtttatgagaagcggttaataatttgctatacggaaatagggagctttcagatggcaatggcggggggaatatgttaaaatgaaataataagaagtgaagcatctaaaaattctggaaattggataaacttttgaggaaagttattttggggagattctggtgcatatgttggaagagtgttattagatgcattatatggtctggctaaccgagaagatgtgcttgaaatacgtaaaagtttttcaaggtcaaacttgtgggaaaaacgtcaaataattagattaattgacagtacatttgatgaggaagagaaaaggccttggcttaagaatatacgtcaaatagaatctaacgaattatttctgttggaaactgcagagccaataaaactgaccaaaaagaaggaaatattaaaaatatcttcggggaggattgaggaagaggcagttacgtcaaagggagtattgtagcttggtgaaattattattttgtactcaatacatgtggagtcggtaataataatgcggaattatggtttgaaagggaaagagaagattaaacttcaagagatagagtagacaagtgggattctattattttatgaatttcaattgtaatgtgatagaaaatagtaagatttgtttttcaaagcgtttccataattatttatggaagaataggagataaaagatatggcgaaagacaagacgaatatacctgcttataatgatatgatgcaagaactttttcaagctattaaagagttaggtggttcgggaacaataaaggaaattgacgataaaacgattgaaatactaggattgtctccagatatattagctgttatgcatggcgatagcagtaaatcggaagtggaatatagattagcttggacaagaacgtatatgaaaaaagtgggtattttagagaattctacacgtggggtatgggcgttaactacatcaggacgtgagttgcaggcaataaattcagaagaaatagtaaaaaaagttcgcgaaatgacgtctttaaaagtaaaggacactgaaaaattttgtctggaggatcaaaatctggagaatgatggtgttgatatgccggatgaaattcaaacatggcgtgaaaaactaaaaaatgtattaaagaatctgaaaccggatgcatttgaacgtttaactcaaagattgctaagggaatctgggtttacccaagtaaaagttacaggaagaaccggagatggtggtatagacggaatgggaactataaaattaaatggaataattagttttcatatgctttttcaatgcaagagatatgttgggaccgtatcggccagtgaaataagagattttagaggagctatgcaaggtagaactgataagggattatttataacaaccggtaaattttcatcttctgcaatagaagaagcgaacagaccgggaacaactccaattgatctaattgatggggatgagttggtagaaaaattgcgtgagttgcaattaggagttgctccggttaatgattatataattgacgatgcctggtttttatcaatttagagtaatcagatattatattacttacatataaaatttatttgtgtaggttacaattaagcagttaaagaatcagtaggttatcgtgttaatattctgagagccacacagtttcgtcagtgggctataaaggaaataagaacctaaacgattcatgggtatgttctggataagagtcgtttggagaatggacagatttttgacgaagagcattttgaatatttattaaatgagattcgggagattcgtgcctgtaagcggaaattctatcaaaagattactgatatttatagataccgaaagctgtctgtaaggtacatacagcggacaagcgaaacggaaaatccctatgacgatggaggattgggccaagcatgctgatggtattttgacctctacaggagaaaatttcttaattggcaatggtaccatcagtcacaatcaggcaatggacaaagcccagacggaatacaagaaatataaagcgaaaacactaagcagtgcggggcgggattacttggacagtataaagcaactggagcagaagggcaaaaaacagtaaaacaaggttattaaatcagcacagtagtggaactagatagcaaaagttttatcaaggtaactgtacggttgctttttacctattgaatagattgagagcgatatctccagaagtattagcaaaatttcgagaactcagtgataaactaattgaatggaagaatttgcttaacaagatgccggagcctctaaagctgggattaactgaaactgaatttgaggaaaaatatacatctaagattgaatgaagcaaaaaattcggcaaaaacggttgggttatttctgaacattaaaacctgcagatattaagaattcgaaagagttattttatgaagggtaagcaaaaatagcggattttatgtttggagaaaagtgataaagatacgaataccagaagattgtttgaggatgagacacttattctgagattgtaaattgtcataactggatgaaaatacggattaactttgaggtggatgtcaggaggatcctattgctatgtttgagtttatgaaaatattaacgttacatgtgagttatgaatgtttaagaggagggatacttccagcctacttgggctcaacgatacgtgggatcatagggaattgcattcatgaattctattgtcatcacagaaatgtaaagtgctttttgtgtgatgaataccataccccaaaggctactcctattatggacggttcacgtaaatgtagtaaactgctcatagaaaaaatgggaagttacggaaatgaccacagtggaaattcgatatcttacacctaacgatgacagaatggcaacagaagcactagaaatttataaggcataaggtggattattattgtgaggattacagatttattaaatgtaaaagtaaaacataaggtttatggtataggtataataactgaggcttcagacaaccatctgacaatcaaatttgtagctaaggaatcaaagtttatatacccagatgcctttgaacagtttatagaggccgaagaagcatcggtgcaagctgaaattatggaagaagtcaataacaaaaaactggctacaaaagtgcagcaacaagcagcaagggaagcacgtaagacggaagaagaacgccgcataacagagggacaaactgttcctgtgaaaagaaatagaaaaagaattgaggatggatttggccctgattataatgtaaggcatttagcaagacagcctattctcacctatcaacaagtagaagaacaatttggaattaagattgctggctttggtcggggaattaatagaacatcgtcgactgtagttcttatttcctcggtagatagaaagaaggctggttttgtatatcatgaccattggacttctgatggggattatatgtattctggcgaaggaaaaactggcgaccagcagatgactattggtaacagagcaattgtagatgcagagcgtgacggaaaaataatacatttgtttgttaagttctcaccacaggaatattattatcaaggcgtattttctttggtgaattatacatacgaagatgacaaagatgaatccggaaatgttcgcaaagagtataagttcagattaagaaaacagtatttagaggaataatgtggtgaaaacaacaaaagtagtagcggcagttatttgtgattctttcgaaagtacaactaagatttttgccactgccagaggatatggtgaattcaagggacaatgggaatttcccggaggaaaaattgaagacggtgaaacaccacagcaggctctgataagagaaatgcaagaggaacttgatgtaaaagtcgaagtcggtgcattgattgatacggttgagtacgattacgctactttccatttaagaatggattgcttctggtgtgttgtggtagatggaaaaattattctcaaagaagcggaagcaggaagatggcttagcaaagatgaattatatagtgtagattggctgccggctgatttagcgttgattaaaaaaatgcagaatagcctatttagatgagacagtagatttgtccccataaaagcccttttccagcgactcgccttttctatcttcccgcttcagcagccctgttatagatagagtagaaccaaatgtttgcagttacagaaatataaactatttttacctccagcataaacttatagtatacagttcttatgcatgtggtttcctgtatgcataaaaaaagaaaggatatgtatatgaataatagcaaggatggaaattatcataaaaatagttgcaattgctgcaattgcggatgctgccgtggcccgcagggcgaacagggtccccagggtcaaccaggtcctcaaggcgaacgaggacttcagggagaacgggggctgcaaggcgaacccggtccccaaggcgaacgtggcctgcaaggtgatgccggcccgcagggtgaacagggtccccaaggcgaaccaggcccccagggagaacgagggctgcaaggcgaatccggtccgcagggagaacgagggctgcaaggcgaacccggtccccaaggtgaaccaggcccccagggagaacgagggctgcaaggcgagcaaggtcctcaaggcgaaccaggcctgcagggtgaaccaggtcctcagggcgaacagggccctgagggcacctttcatccaggagatgttttgttttatatcaatggcaacggtggtccaatacccatccgatttggagaggagttaaactttatatctcccaatcttaatattaatatatttgacaatccagcgactgtagaaatagacggaaaagcaagggaaactgcattcggcggtatttattccaacatgatgcaatcgtttgcttttacttccattgaccagattgaacaggtgcagcttaacaattttatgccttcttttgatgttggtacagttacaaacggactgcagatttattttccaggcgaatatgaaatcaattacatgatccgtatcgccccagttgatgtgccggaccagacaatttctgcgggagtacggcagaatgacattttcatggactctacgttgcaatatagcacactatccacaacggtagacacaatattgcagggaagcgtcattgaatacctgagcggtcaggttgacttggcatttttgtcgactgatgctgcaagattcaatttgtcatcacttacaaacgctgcgcttacggtgaaacgaatttcaccatttttataataaaaataagactgtgtaacagcttcattcgactataacaaaattacaacaccattgggcatcatgatatatcggcccaagcaggatgtgggtgaatactgtaaaataaacaatataacatctgattacccgggcaaaatataagaatgtgtagtaacaatctgaacagacgtccagcagtgcaaatatacaacagatgtaagtcatgaccattaggcagttgtcaatcgtcaaatatgaccgtgtatagaaagaccgctgacttccagttatctttgaaagttagcggtcgtggatataagttttgaaagccagcagtaatcgtttttctgttctacacagactcattcacaccatggctggttacgttaactttattgtctgcaataatctgacataagtgttctctcgatagctttaaaaagctcctttctgaaaaagaattagtttttcaaatacttttcaagaaagatccgtttgttttcaaagacgcacactacgttacgctgtcattccctgctggtgcagagcctgcttttatgtaattatttgttaaatacgaatgtaatatctttgcttgaccaaaagtctggagagactttaatttccatggtactccaatcggcaggtacctgatatgcaattattccattcatcttcttcccggcagcaacagaaccgtcaagctgattttttccttcagcttctgatacttgtaaacctaaaatatcttggtttattgagtaatcatcacagtatgcttcaaaactggctattgaactgatagcaatatcttcttctgaattatttgtaacctcgaactcgcacaataaaaatacattaccctcatcaggtgttgcaaactcatttccacttgattctgtagtggataacagagttatctgaataccttttggttcagccgtttctcctatggcaaattccgttttttcctcggttgcttcagactttgtgtctccttttccagcggtcccgtctttaaccttgtcatcttttttacccaaagcagttccaattactcctagaatggcgagtacaacgataacaatcaatgcaatttctgttccttagacatgtttttctcagttttaattataagcgtttcaatatcgtcataggttggttcatttttatcaatgacagagtcatcgaaatcatttagagtcaggccaagtactccagcaatggatttaagggtctctaacttaggatctttggtagcgccactgagaattttatttatagtgccaagaggtacaccagatcattctgcaagttctgcatttgttaaccccaatttctttttaaattcagcgatttttccagacccatttttttacctcctatggtaatattgttatacatctgctagtcgttatcggtttaaatggaatccggcacctccacagccggcttcccataggagatcgcagaagagagataccgcgtctcatcaacagtttacaaataaaaaagagaatgatactattttgatagtacttcaaaagcagatgaagatgccaggaaagatcagaagtaaaagataaaggaagcatatgaaaatcaaacagggtatttccaattatgaaaaaatgaaaaacaatatggcagatgtatttctgcaatacgatcaggaagagatgatccggaagtttggactggtgcaggacaaaaactatctgtatatttgttgtctgaaccggcaatatcgtatcagccgtcggaacgggcaggtaagctggtcggaggatgcttttcaaacggaaggagaggctgactacaacgaagccatgaccttatatgatgtgctctgctgctccaaagagaactgccatctcgcctgtgagtgggtgaatgtgggaagtctttctgcagtacagggcggcacattggcaaaaggaagcgatttttttcaggaggccgggaagtatttcgacgggaaaaaggatgccttggcccgtgcatgtgaaaggcttaagggaagaaaggtggaaaagggggatgttgcctatgagctcgatttgtttccttttcttccggtagttttaaggttttgggaatccgatgaagaatttcccgcaagtctgcaaatccttgtggataaaaatattcttgattatatgcattatgagacccttatgtttgccatttcacatatgttgaaccgattaagagatgaggtaaataaggtttcgccctaagggatacagagataataccgaatagtttaaaaagagggatttgccggacaaaaaataccatccggcaaatccctttattttgtttggcaaaacaagtgccagacatttttttcatacccggacaactgcttttatggacgcttcatctcaaatgtagtaaactgaattcagcaggaaatagaattttggaggaatcgatttgggaaaaaagacggaacagtctcaaaaagtatataatgccatggcgtgggaatatgactctgcgccagagggcagttacacaagaccccacaaagaagagataattaaaaacgctgtgctcagggaaggcgacactgttctggacgttgcctgcggcaatgggcatttgcttggggaactcttaaaaaaggagaggatacacgcttttggggtggatatttctgaaaatatgatagctgctgccagggcaaaatacccgggctgcacatttgcagtggggccttgtgctcctctcagttatgaaaatgagagcgtggacgtcattacagtgtcctgcgcatttcatcattttgagactccccaggcttttgccagggaatgtatgcgggtattgaagaaaaacgggagagtatttattgccgagccatttttccttccggcagtaaggtggattgccaatgtggtggtatttccattttccaaaaccggtgacgtaaaggtgtatagccaaaaagaactgcatctgttttttgagcaggctggtttttctgacattgaaacctacataacaggtacggtattatttctttccgcaagaaaataaactgtagtggtagaagctaaaatgttcgctgctatgccagtgtgcagaaagcctgccggttgataaggacacaggcaggcggcattgcgtgtcagcataatatatgatagggagaaagtgtatatggaaaaaaagatgagctgctgcggtaccatatgctccgattgtgagtattacccaacggagtgccggggatgccgggagatcaagggcaaggtattctggctggaatatacaggggaaaactgctgtgatatttatgagtgctgtatcaatcaaaagaaatacgagcattgcgggaaatgtgaggaattgccgtgccaacgctatgaacgtgatgacccaacaaaaacgaaggaagagaatgaagccgatcactttatgcagatagagaatttaaaaaaatacaaggaagaatagaggaaagatggaggctgttaaaggggcaggtgacgcctctgtttaccgattataaaaaatgattgaaggtatagagaacgttacatggagagaaggagcaaaattgataagatatgtaaccaagagtgatgaaagacaaatagtgtccatgatggaactggtaaaagatgattttgccggttataaagaaaaagaatttttacaggcagtacacaatgctgtcaggaaagaggaagctattatggaagaggaagacgggagaatagcaggtctgcttatgtgctcaaaagaaacaaaagaactgtccttccttgctgtgcatccagactatcgtaaaaagggtgtggctaaaagattgattgtgaaaatggctgaatggtttacttccggagatatcatttctgtagttactttccgggagggggacccgaaaggaatacctgccagagcatgttatcatgcctgcggatttgtggatgacgaaaacttgatagtatttgattatccctgtcagagactagtcctgcggttataaaaggaaaaagaaagatatgagatggaactataaacatacacaagagtacttagatattttttagactataccatagatgcggggggatattatgtcaaagggacttttagacgtattgttagacagtatatttgatgcaaactgggtgggacggcgtggagagaaattgacagagagggagcttaacttagtgaaactgcttggccgaaagggtcaggtacttcgcaacatttatgtgccgaaggataatggcgagacatcggagatcgatgtagtctttattacccaaaagggaatcttcgtcatagagagtaaaaattattcaggctggatttttggggatgagaaagatacttattggacagccatgctgccgaatcgggaaaaaaaccgattttataatcctattaagcagaatcgaacgcatatcaagtggcttggacaataccttggggaggatattccactattttcaatagttgtattttcagaacggtgcgaactgaaaaaggtaacggtagagagttctgatatccgtgttatcaaaagggatcggctatacgcagcggtgagagatatttgggatcatgcaaatgacgcagcagacgagactaaggtgaaagctttgtatgatatgctggaagtattgacccatgcggatcaggcggttaaggcggctcatatagagctcattcacaaaaagtataacaagacagagcagcaggacacttctctcatctgcccccgctgcggaagtgcccttgcatttcgccaggcaaaaaagggcgcgaatgccggtcgtggattctatggctgctccaagtatccgaaatgcaggtatatacggaacatcgaagagacataaggacgtggtatcatgaaaacaaaggataaagaggagaaattatgtttaacaaaattctgttgaaaaaggcgcttgccgggtacaaaaaggattttgtgcagaagcagtggccggaggaaaaatataaatgggaagcggttaagtgctttcagatgaattgggatgtcaacgcggatgattttgcacagatgatcaggaaggctctgtcgcaaacaggaaatcttcttgcctctgcgaataacttcccggctcggatgattacgaagtttgctgaactcgctcctgaagaagttcgctccatgtttattgagctctttgacgagagcagggatacatacgagcgtgttgcgaactttaagcagaagtctggttttctgttagagagatacgggaatggtgcagcacagcattatcagcatgagaacgcgatctgcacctacatgtggctgcgatatcccgacaagtactacatttataagctgggtgagattagagtaatagcagatgaactggaaagtgattatcattttaaaaggggagcgtttgctgaaaatatccgtaatttcattgctttctatgatgaaatctgtaaggaattgaagcaggacaatgagctaaaggatctcctcaattcccaattgagcgggacctgttattcagacccggagcttcacactcttaccatcgatgttgggttttacatcagcagacatgttggaaaacaggattctcagccggatgccgatgaatggtggcctctggattatacaccggcgctttctgctgatgaatgggaagcacttcttgaagatgacgaggtttttacatccagcagtctggagataatgaagagaatgcttgcctatggcggaaaggccacgtgtacgcagttatccatcaaatatggagagagcaggaacttttacaatgcaggctcatctgcgttggctaagcgggtagtgcaaaaaacaggatgcccggttatgcagagggaggatgaaagttcacgctggtggccggtgctttatgttggcaaaaatgccaaaaaggacgaggatggttcttatgtgtggaggcttcgtgaagaattggcagaggcattaaaaagaattgatttatcccaggtggatttgtatgcgaacctttcacctgcaatctggaaaatcagtcatggcatggattgcattaccgatgacgaagcagcagcttttctaaaaaaacacgtggttgtggtacataaggacacagcggctaaggcgaggtgcaaaactgcccagggggaaagctttatggccaacatgaaaaagggtgactatttttacctatgccgtgggaacagcatccgcctgctgggaagaattgattctgatgaagcagagctgaaccaggagaaacagaatggatggtatcagcgctcttatacggctatcgcggaatcttgtgacaccaaaccttatacgggaaagcaaaaatggtggacacctaatgataactccacctgtatagaggtgggggatgcagataagcagttgtttgaagcagtgattttgaagccgtatttcgatataacggtgggccagctgcttaagaatgatacttcgggcaggcattactggtttttaaatgccaatcccaaaatctggagtatctcaggcatgcctgtcggcggaatacaggattatacgctctacaatgataacgggaataagcgcaggatctttcagaactttttggatgcaaaggccggtgatatggtgattgggtatgagtctacgccggtgaagcagattgtagcaattgccagagttactgcagagcaggatggagagaagatatacttcgaaaaaatagaaggcttatcatcaccgattgattacgcagcccttaaagcctgccaggagctggaacgtatggagtatttttctatgcagcagggcagcctgtttaagctgacaaagggcgaatatgaatttatcctggatatgattcgtgaggagaatccggcgcctgttccggcagataccttacctaaatattccagggagaaatttcttgaccaagtatatatgacaggggataagtacgagcgtttggcttctgtccttcgaaggaaaaagaatattattctgcagggggctccgggtgtgggcaagacatatgcagcgaagcgcctggcttatgcaatgatgggtgagaaggacgatgaccgcattgcattcgtgcagttccatcagaattactcatacgaagattttatgatggggtacaaacctgttgacgatggcttcgaattgaaatatggagttttttatggcttctgtaaaaaagctgcaaatcatccggataaagattattactttataatagatgagatcaatcgcggcaatatgagtaagatattcggtgaactgcttatgctgattgagtgcgattatcgtggaacaagcgccactttagcttataacggactgagtttttcagtgcccaaacgtctccatatcattggcttgatgaatacggcggacagaagcctggcaatgatcgattacgcgctgcgccgccggtttagctttttcgatatggagccgggattcacgtctgagggtttcattaagtatcagaaaagccttgccaatgatacttttgacgcactcatcgaaaaaatcaaacagctaaatgaggaaattagtgcagatacctcactggggaaaggattctgtatagggcacagctatttctgcaatatttcggaatgtacggatgaatggctgaaggacattgttgattttgatattctgccaatgctgagcgaatattggtttgacgataagcccacatatcagcgctgggaaaatattctgcagggagtatttcaatgaagaaggataagggcatagtaataaaaaatatatactatatgctgtcctatgcatttaaaatactgaaccagtccgtttatgaagaggtggcggcggaggagtttgatgacatgtataatctcttttcggcaatattgtcaaaggggattggactgcagcttaagcagggactgtatcgggaatataggaactgccaggctgaactgcctgccatgcgcggaaaaattaatatgccgggcacgatccgaaaccggctggggcatgaaagggtgctgacctgtgattttgatgagctgtcagagaacaatacactcaaccagattataaaaacaacggtaatgcttttacttcgaaactgcaaggtgaagtcaaattacaaagatgacctgaagaaaaaaatgctgttcttttccggagtggatatccttgagccgtcagccatacagtggacatcaatacgattacagagaaataatcagacatacagagtgctgataggtatctgccagatgatcctggaaggaatgctaatcagcaccgagaagggtaagtataaacttgcgtcttttatagacgaacagagaatgtgccgcttgtatgaaaaatttatattagcgtattattctcagcattttccgtcattatcagcagacgcgtctcaaatttcgtgggcactggacgatgatatcaggacgatgctgcccaaaatgaggactgatatacatcttcaaaagggcaataccgtgctcatcatcgatgcaaagtactatgcccgtactacgcagaaacagtatgacaagcatacactgcattcaaacaacctgtatcagatttttacctatgtaaaaaaccggcattatgcatttggggataagcccaatgaggtatcaggtatgctgctgtatgcaaaaacagaggaagagattcagccaaataatgtctatcggatgcatggaaataaggtcagtgtaaaaacgctggatttgaacttgccgtttacagatattacagcgcagttggatgcaatcgtcagggaacattttggtgatacactgattcgcagatagaaggatgtacttccattatgtaaatatgaaggcaggggttttgccgggggaaactaagccgaaggacaaaaccccaaacagttaacaaaaggtatgcgctaaagcaaaaggatcacataagggatactatggctttaaaattactttaatacagccatcctcttttttatcaaaaatactatacgcgtggcttccttcttctaaggaaagcttatgggtgatgatatctgtggcatcaaattcacctttttgaatcttctgcagtatcaaatccacatatctggtggcagggcactgtcccatttttaaggaaatattcttggagaaaaagtttccaagagggaaattattatatttattgccatagacgcctaccagggctacggttcccgtttttctgatacattgggaagctgtttctatggctgactttgatccgccctgcagtttaagcgccgtttcgattttttccacaacagaggttttgccatccagaccaacacagtcaataacagagtgagcacctccgtgagtgatttcttttatatactcgcctacttgttcatactcttcaaaatttattgcttccacaccatagcttcttgcatggttcaggcgatatcccacacgatccactgcaataatcctgccggctcctttttgaatacaccatttgatcgtcatcagtcctatggggccgcagcctaatacaactacggtatctccggcttttacatttgctatttcagttccccaataagaagtgggcaggacgtctgttacaaataaaacctgctcatctgtcaattcctccggaactttttttggccctacattggcataaggtactctgatatattctgcttgaccaccggcgtaatttccatgatatttactataaccaaataatccccccgattcagcgtaatcgtttgaattatcgcactgactgtactctcctttattacagaattcacaatgtccgcatgccaccggaaaagggattaccacccggtcgccttttttcagatgcttcacttccttcccggcttcttcaacaatacccatagtctcatgacccagcacatacccgtcatacattccttttactaagccgtgcactaaatgtaaatccgatccgcagattgctgtagaagtaacttttacgatgacatcatcctctttttctattttgggatcttctacggatctgcattccactttctgcagcccatcatatacgatagctttcattgcaatacctcctgttttgatttaaaaatattatttgtagatgaagcaaatctataccgggcgatttatatataggaatctttttttatatgctacctcaaaaggccaggtatacataaaaacagacggtggcaagcggaagcttgattctgctagacggtttcagagcaccgagtacatatgaaactatagaactttcaggggagatactgcatttataattaggcggtatctccccttattccattttaaaatgctgttatctttttatcataatagttcttcaaaggcgacatagtgactggagtgcagattatctccaaactccggaaaaccacataatagtttctttcaattgttttgcaagttcttcatcagctttatgaaattcaggaatttgaatattttgtatatcatatcgttgatttaatagtaatccttctaacatattgggaaattgtacttccagagtatcagaatatactttgcactcactaataataagattatggagtttcagattaacttctacttcgccccatgtaaatctatgggaataaacagtctcgcattctggtgatctaccatatctccagtcccaggaagagtacatcttataatattcttgtatcttatcattatttaacatatccaaagataattctgtacatctgccatattgttcttcaaatgcagctctaagtgcagcgcgcattccatctacagttaagccggtattcaattcctgcagattgcatactcgggaacttacagaggcaattcctttggcctttaatttttcctgagtaggagtcagataacgctgcagcttgtttacatctacatttatcataagtgtgccgtgttggacctttccccttgaagtcattgagaaggcgctgccggagaattttctgttgtcatctgtaagcaaatcatttcttccggaaaaatgggagcaaataccatatttttggcatgctttcattactatttttaattgctcttcgacgtcgtatctttcttctgaagccacaaatgtaaaacaaaggtttcctaaatcctgatatacagcacctccccctgtagatctgcgtgccaggtaaccaccctctgcttccagaagctgtacacggcattcccgtagcgcattctggttttgtccaataacaacggtattttggttttgccataaataaagaataacttcttctttctgtacataatctgccaaatatttttctactgcaagattataccaagggttgtacgcattagattcaataaaataattttccatagtatttagtcacctttcttttaatattgtatgtacatagtgcattggtttcatgcaaaatgtgtattttccaccccagaaatgtaggccggagttgaccgtgtcataaatcgttatgttcattcaatttaatcctttcttaagctttaatttcccggtgttttttagttcatatttttaaggatttcagaccttttaagtataacacttattttttgaaatcaatcttatgcattttatacaagaataccactatataaagtgcaaagtgatgaaacgataattttaattataataagtattgcaataatagataatataatatataatgcaattataattataacacgtgcagtgattattgcaatatgaattcataacaccatttggagttaatgaatgtttcttaagctatatagcttaaaaaatattttaaaaggaggaaaaaaatgaacttatcaaacaaaaaacttctggaaatgtatgaaaccatgcagaagatccgtcagtttgaatttcagactgcgaagagctttgccgaaggggacgtacttggttttgtgcatctgtacatcggtgaggaggcaattgcaaccggtacatgtgcaaaccttgtagacggcgattatattaccagtacgcacagagggcatggacatatcattgctaaaggcgcagatatgaaaaagatgatggctgaactgtgggggaaagagacaggctattgcaaaggcaaagggggctcgatgcatattgcggatacagagctcggaatccttggagcaaatggcattgtaggaggaggttttacattggcagcaggtgccgcattttcctccatgatgcttaaaaacaacaaagtatgtatttgcttccacggagatggctcaacagcagagggttcctaccatgaggcaatgaatattgcaagtctttggaatctgccaattgtatttgtaaatgagaacaacttatatgcaatttcttgtcgtattacaaatggaatgaagacagaaaatactgcagaccgtgctgcagcgtattccatgccaagtgaaattgtagacggaaatgatatccttgcagttcaccaggcaatgaaaaatgcaattgaccgcgcaagaaatggctatggaccaagttatgttgagtgtaagacataccgttggagaggtcattttgaaggagaaccggaaaattatcgtaacccggaagaaatcaaactctggaaacagccggatcatgatccgatccccagattcgaagaatacttaaaagaaaaccgcgttgcaagtcaggaagaacttactgctattcaggaaaaagtaagagggatgataaaggaagctgtgaagtttgcggcagaaagtccattcccgactaaagaaaaggctcttacagatgtatatacagatattgtagaggaggcgagataatgagaaatatatatttttcagaagcgatatctgatgcgattcgttttgagatggagaaggatcctaccgttttctgcattggcgaagatgttgggctggtagacggatctatgggagctacaagggggctgtatagacagtttggtaaggagcgggttcgtgatacaccggtagcagaacagatgatagtaggactttcagctggcgcagcccttaccggaatgcgtccggtggcagaacttatgtacaatgattttatgggctgctgtatggatcagattatgaatcagacggcgaaattccgttatatgtatgggggaagtatgaatgttcccatgacattaagacttaccagcggcggaggaatgcagagcgcagcgcagcattcacagtcgctagaggcaatgctggtgcatcttcctggtctgaaggtggtatatccatccacacctcaggatgcatacggtctgcttttgacgtcaatagaagatgataatcccgttatgttttttgagcatcagatgctttatcagacaaagggagaagtggtagataaagatgaatatgctccgattcccctgggaagcgcagatataaagcgggcaggaagcgatgtaaccgtagttgccactggtttgtgtgtgttgaaagctctggaagcggcaaaagaattggaaaaagacaatatcagtattgaggtgattgatccaaggactttatatcccttcgataaagaattggtttataaatctatctctaagaccagaaaacttgtagtcgttacagaagaagtcaaacggggagcatggtctggggaactggcagcgaatgttgcagaggacatgtttgaaacattggataaaggaattatccgtgtcggcgcactgaatacaccggttccatttacggtgacacttgaggagtattacttcccacagaagaatgacataatagacgcagtaaagaaaataatgggataaattgggcttcgtgtacagttgctgcagcaggggctgctgtataaggaattgtgttcagctgcccctgtacgaaacagaataaattatattactggaggtaatgaaatggttaagattttcaaactgcccaaaatgggttctacaatgaaggaaggaacggtaggaaaatatttggttgcagaaggagataaagtatctgaaggagatttcttatatgaagtggagactgacaagattacgaaccaggtagaatctgatatggagggcttcgttagaaaacttctggtagaagaaggcacccttgttgcatgtcagacgccggttctgattgtatcagaggatgaaaatgaggatatttctacatatttataaaaaagtggccggtgatgacagatgcgcatacgccctgtctgctggttcgcagattataatgaactgtaattcagaggggagaaatgacaaacatgaagttattgattggtctggatttaggaacaactgctcttaaggttgcattattcgacagtgcgggaacactgttggctgtatctgccaaggagtatagtttaataactcctaaagtaaattttgtggaagaggatcctgaaatttattggaaggctttcaaagacggccttgctgacctgaaggctcagtatcctatccaggagcaggatagtctggcactagcaatttcagctcagggtgagacattgctttgtattgacaaagaggggaaaagcttaagaaatgcgattgtctggatggataaccgtgcagtaaaagaggcaagggaaatggaggctcaattcggaaatgaaacgtgctatcaggtgactggtcaagtgagcttcgaaccttgctggccggcggcaaaaatcctttggcttagaaggaatgaacctgaggtatttgcaaagacatataagtttttgctgatagaggattatttcatttatagaataacaggcctgtttgcaacagaggggtctttagtttgttcgtctgcatactggaatattaccacgaaaaagtactggccggagatgttgaagtttgtgggaattgaggaagaacagcttgcacctgtgtatgaatccggtgaggtagtgggaaaggtacgtcctgaaatcagtaaagaactggggcttgggactgatatcaccgtttgtacaggcgccttggatcaggccgcaggggcaattggagtcggcaatgtccatgcagggatgttttcagaaaatattggttctgccttagctatttgcgttccggttgcaggtcctatttttgatccaaacggtaagatgccgctgcactattttgcaattcctgatatgtacatgctgcatacgtttactacaggggggatggctcttcgctggttcagagataagttctgcaaagaagagatggcaatagaatcaatttcagatgtaagtgcttatgatttgatggggaaagaggcggccagtgtccctgcaggagcagaagggcttttaatgctccctcatctgtctggttctcttgctcctgacgtgaatgccaaagctaagggcgtatggtttggattcactatgaagcatacgaaggcacattttgtaagagcaatttttgagtcggtgggatatactcttcaacgcaatatcgatacattggaagcgatgggaattgaagtaaatgaggtacgctctcttgggggaggctctaagagtgaagtatggagccagattaaatcagatattacaggaaagaaactgctcacaacaaaatcaaaagaggctgcatgcctgggagcggctattctggcaggcaaggcagtggggatttttgacagtatagatagcgctgtcgataggatgattgggataaaagcagactttgagcctgtttcaggaaacagagaagtgtacgaaaaaggatataagatgtactgtaagctgtttaaagatttgacaggctgttttgaacaaacattatgataaataggagaagaaaatgaaagaaaaattaattgttatgctgacacatcacgatgtaacagtaaagaacgcgaaagaggtatttgaggcatgcaaagaccttccggtacgaaactggggatttaaggacgtggggcttcaaccaggggatatgaaggaattatgccagctgatgaagctttccggtaaaactaccttccttgaagtggttacatattctgaacttgaatgtatgcgaggcgctcagcttgcagtggagtgcggatttgattatcttgcagggactattttttatgacagcgttttggattatatcaaacagcatgatgtgaagtattgtccgtttgtcgggcgggtatccggaagtcccagtgtattaaaaggtacagttgagttttgtgtgaatcaggccgaggcctacgcaaagaaaggtgtatatggtattgatcttctgggatatcgctatgcggagggtgatccggaagtgttctcccgggaaattgttgccaagtgccagctgccggttattatggcgggcagtattgattcacagaagagaattgaagtggttcgtaagatgaatccctggacttttacaatgggtagtgcattgtttgataaaaagtttgtgaaggatggcacattccgtgaaaatctggaaaaggttatatcactgttgtaggcagacgtatatttttgcagagtgaagcaagaaaagtgttgttgacaagtggaggcttaatatgaaaattgttaaaaaagcagatgccaaggtcagtcttgacggtccggaagttgtaagggattattgtaggacggacaaaatctggtttggcacttcagaacttcttccgggacagacgggagggattgatccgggacatccgatttctcatgaaacctttttcgcctgtagaggacatgtggtggtacgtaatggccagtctggaaagtggtatgaacttcaagagggcgatttacttcttattgaagagggagagccccatgaaatcactaacataggtacagaaccggcattgatttcttggtgcggcggtccggttgactagaaagcggagaggtgcctggaagagaagaaataaagaccaggtgtaatgaggaggtaaagattgaaaatgaatgaacaattaaaaatgggccttgtaggcttgtgcagtccgattgaaagcggcgggcagagatacgaggagttaatggaaagtgcatctgcggcaatgagagaagcaggtatagatgtggttgtggcagaacgctgtgttttggaaccggcagatgctttgaaggtatgcatccaattcaaagaggcgggaattaagtcaatagccataatggatattacctgggtaatggactctttaaaatacatttttatgcaggaattgaagcttccgtcggtattttgggcggtaccttatccggaaaccttctccataggctgtgttcagaattttggttccgtattaaagaatttcggtgtccattttgagtatgtatacggtcttgcggatgataaagagcttatcaataaggtgaaaaatgttgcccgtgtcggttggatcattgaaaaagtaaggtcaatgcgtctggcactgattggctcacgtcagacctggagagttgcaggcccccaggatatgagtatcgaagaatgggagttttcaaaaacagtgggaccgactattctccattttgaaatggaggaaatcattgatgcggcacaggaaatatgtgatgaagaggcaaaagtgactctggaaaggctgaatgatcgtactggtgttgtgaaatgcagtgaagacaacatggtatggatggcaaagatgtatatggcaacaaaggctatgatccaaaatgcaggattggacgctatagcagcagagtgttatccaaattatggcgggatgatgaaccagacagcatcgtggcttgcggacgaaggtatcattgttgatacagagggtgatatagcacatgctgtggtacagtatattttaaatcttgcatcagaaggcggtgcgtgtgctctgggcgagattggcgcctttaatgataaggataattatttgactgtctgccatgaaggcagttctgccgtttcgctggctgacagcatggataaagtagtgtctaacccggcaggggacaaggtatccttcatcggctttccgttaaaagccatgaataaagttaccttctgtgatatgcagggaagcgctggaagttatcagctgatgatcgccacaggttctacactaccggtaaaccatcaggagtgggttgatgcaggggaaaaactagttgtaaaactgagaactgacggtgtaaaggcaagtcaggtggttgatcagatgattgagaatggcctgcatcaccatgtaattatcaaagaaggtgattatgcagaacttttgaagatgctatgtggatatatgggaattcagaaagtgattcttaaataacttatggagaatggcatgataaaaacagatgtaatagtattaggaggcgggccgggcggctacctggcagcagaacgcgctgcccacggcgggaaaaaagttattctgattgagaagagagcacttggaggtacctgcctgaacgagggatgtatcccgtcaaaagcattattgaattctgcaaagctttatgaacatgcaaaggatagtgcaaacttcggtgtgactgcggagaatgtgaggattggccataagcaggtgattcagcacaaggatcaagtagtacatatgctggttgccggcgtaggcgctaagatgaaggccaatggtgtaaacgtggtaacgggcagcggatatgtagaaggtaagacagaagaaggcttcgttgtacgggccgaggatgagacatatttaggggagaaactgattcttgcgtgcggttctgtccctgtgattccgggaattccgggattaaaagaaggaattgaaaatggattcgttatgaccagcaaagaagcgcttagcagaaccactcttcccgaaaagcttgtagtaataggcggcggtgtaattgggcttgaaatggcttcctattttgccatgacgggcgtaaatgtaactattatcgaaatgttggacaagattgcaggaccggcggaaagagaaattgcctcaattcttttgagaaattacaagcgcagaggtgtgaaattcagacttggctgcaaagtgactgaggttacggaacagggcgtgcggtatgaggataaagggggagaacgtctggaacaggctgacgcagttctttgtgccattggacgaagggcctgtacagagaatatagggctggagaatttggggatttctgttaatcgcggtgcgattgagacagatgaacatatgcataccaatatacctggcgtttatgcagtgggggacatcaatgggaaagttatgttagcacataccgcatacagagaagctgaagtcgccgtaaatgatattttgggcattgaagattccatggaatatgagcagattccgtacgttatttatactaatccggaagtcgcgggtgtgggagagaccgaagaaagtgcagctgcgaaaggcatgaatgtaagagttgcaaatgtttccatgaactactcaggaagatatctggctgaggtggagagaggagacggcacctgcaagctgataataaatacggatgataacacgattgtcggcgtccatatgattggaagctatacatcggagattatttatggtgcagagatgatgattggttctaaaaaaacaattacggatctgcagaagcttgtatttccgcatccgactgtgtgcgaggtggtcagagaggcattgtttatgtagtgtaaaatttatattttcagaggaggaggaaggtaatgaaaaaaataacagttgtcggctgtggaaccatgggaagttcattgattcatgcgctgatgaacggtgggattgaggtaacgattgttgatattaataaaaatgcagcagacaaatttattaaacgtggagcgagatattatgcaagtctggacgaggcgggtgatacggaatgcatactgattaatctaccaaatcataaaattgcatctgccgttatgaatagcgctgataaagaacggcttagaggaaagatgttaatcaatacaaccacctccagtcctgatgaagttaaggatatggatcgtattgcaaaagaaaagggcatgctgcatttggatgctaaaatagagaactatcctggggatatcggtactgaaaaagcctatcttctttattcgggaagcaaagaagtattcgacagcgccaagaatgcactggatgcaatcggaaccgcagtatatcttggagaagatgtaattggcgcaagtgtgattgacattgcagttctcgaagtacattttggagcaattgcagctcttgcggaagcagttgcatattgtattaagaacaattatccggttgcatcctttattgagcaggcagagcacattcttccaattatgctggctggaaattatcgttcctttgcagatgaatgcagcaattatacgggcaagtttgaagatgcttctgaatgtaccttacgaatagaagtttcttcgatgaaaacgattctgaactctatgcattctgttggtgtaaaaacaccctgcggagatgcaattttgaagctgtttgagaaaggcgccgagcacggtaacagcgccaaaaatgttgtagcggttgtaaatgaactgatttagacagaagaggcagaggttatggcatacgtaattggtattgatacaggtggaacctatacagacgcagtactgttaaaaacagacggggactgcggccgcggagtcgtgcgtaaggctaaagctcttactacgcatgaaaagctggaaaatggaatcagtgaaagcatttataaattgaggctgacagctcaggaaacatcggaagttgaaagggtagtgctatcaacgacgctggctacaaatgcaatcgtggaaagcaagactggaaaggttggcgttataattataggggaacgcccctggggcgtattggcatcagagaaaatgatgcatgtggatggtgaggtgaacattaaagggcgtgtgttatcaaatgtgcgctcagaacaggtacgaagcctgctggatgatttccttccagggctggatgcagtggctatttcaggtgcatccagtatccgaaatccggagcaggagctgcaggtaaagagccttgtgcaggaaaaaacagatattccggtaatgtgtggacatgaaattgcgaatgttctgggatatttggaacgcacaaatactgttattttaaatgcaggtttactgcccattattcatggatttattaaagcaatggaaacatcgctgaaaaaatatcacatatcggcgccggtttttgtaatgaaaggggacggaagcattgcaagtcttgcgtttatcaaagaaaaaccaatcgaaaccgttctttcaggaccggctgcaagtatgacaggcgctgttaatctggcacagatagagaccgcaattgtatctgatatgggaggaactactacggatgtgggagttattcgcaataaacgtgtggaactgtcacatggaggggcactagtaggaccgtggaaaatccaaattcgctctgcaaaacttcatacctttggacttggtggggacagtaatattgcatatgaagatgggaaaataatcatcggaccagaaagggttctgccggcttgcagaggtggtatcgatacaattacgcctactgatattgtccattatacagaagaatatgtattgtgggatcgggacaaatcaataaaatccattgcagggcttgcagataggattggaattccgaaggatgagcttgttaaaaagctagaggaggcagttgttcggaaggtcctggatgtattgggggcccacgagagtctgcctgtatgtgcggtcggagctccggcacgaacctggtatgaaaaagcaagggaagaaagtggattggatgcagtaatccctgagcattatgaggtagcgaatgcagtaggagcagctacagcaggaattcgggagacggtggaagcaacggttcgcccaggggaagaggggcgggggtatctcgcccatacaaaaactggacgttatttttccagttttcgtaaagacgcattacaaagagcagtggatatatcctgcagctatgcgaaggaagtgatttacaggcagaatttggaactggcggaactttcggttatctgtgaagatgtctttgaacataatggaaaactggtatatgaattcttaaatgtttctgagaaaggtgttttgctcagcgaatgcaaagatggagagcgtcattttatagaaacggtggttcgggtgactgcacagggtaaaatcttcgaggattgatttcacgggaatactctatcaatgagctggcataaaaaatttagaagtgaggtatatagatgagtgtattaaacaaaacaggaaaagaatatttaaacagtctgattccggaaaatgttccggattggaagaaatcatggcaggaaggttacgagattggaaagacaattacaatagcagagactccatttaagaaaaaatatggaatgagcgatgtggactatcgtctccagagggcaaaagaaggaaagattagctggaagatgaatatgggatttgcttccgttgacgatgaagtggcagcaatgaaagcagtccaaaaattcaatgatgaaactggtcttcgggtcagttttgtacatcaacttccccaaaacctagtgggaaccccaaaagaaaaacgcggaaatctgccaaaagcgcttggctttgacttagataagctggaggattgggaaagaattatgcaggctgctgaagtacagccagtcttcggtgataatcatcttggttttcccaatgctgtatatatgacaattaattgtatgaaagccggctgctcttaccaggggctgtttggaaccttccagcaggtagcgcagggctgtcctgacgaagtctggaacatgaatgagaatattaaggctcttggaattgtagctgcaaaatacgatgaaaaaatcattgtaaattctaatgctgacgacagtatgccggcatatttctccgaccttgtttcttaccttgcatgggcaaagtgggagcgttacgtagtatccgatctgtgcaaggcaagatattcgtttagctttggcaatcttaccactaaccttattgacaaagcagccgtgtggctggctgccagcgatactttcaggaaggatgatcagccgggcattgagttcctgcatgcaaatacagtagatcattgggatcatcacctgcattcgaattacggtttccagattccggaagcattaatgatgattcttgtagaaagaaaatacaaaacaggtgcagcatatacttctgtgcctattacagaaaaggtaaccattcccacacttcaggaactgctggatatgactggcgcatgccagagagcagaactccgtgcagatgattatatgcgtctgattgactggacgacgattgaaaagcttcgggacgaagtaaaggcgcattcggacattatgtttgataatatcatgaatgggatgaaagaggctggaattgatatcacaaatcctattgagatgatggtagttttcaagaagatggatcccacaaaatttgagcagttcttccacccttcaattgtaaatgatggaaaagcctatgtggaaccgtatcttcctgcagccctttggagcgttgcagacgatatgggcaaggtggttgctgagcgtttgagaaaacagggctatgcagagaaactaaaaggcaaacgcatttgtgttgtatcaggagatctgcatttctatggttcttttgtagtggctaatgtgttggaggcgttaggcgcagatgtaataaatggcggaaactcaatggatgccatcgatgtcctggatatcgcagatgaacatggggttactgatatctgtatcagcctgcataatggacaggctctgccatattcgaagcttttgttaagtctggcggaaaagaggaatgcgaagtaccgtttcttcatgggaggagttctgacaagttttgtaaacgataacgacgcggagccttcagatgttagcccaatacttcaggaaatgggattatatacaactggaccagtggaagagcttgtggcaaaactggcggaataaagcagggaggactgcacaatggaaattaaagtaaaaggcatgagaaaaatcatttcccagagaatgagtgagagctggcatacatctccccgcgttgtgtttacattaagtgtagatatgacaaaagtacaggcatatctggaaagagtgaatgaaggtgtaaatgacaaattgcagaaggttacgctgaaccatgttctgatgaaggtctgtgctgaagctatgaaggaatatgagtatgtgaacggcagcatagacgatgaaatcattatacttcatgagacaattaatatcggccttgctgtggcagtagagaatggtttgatagtaccgaatgtaaaggatatcggaagcaaggatataaaaacaattgcggccgaatgcaataatgtggtagcccgtgcaagggaaaataaaattacaatggatgatattaccggcggcacttttacaatttcaaatctaggaatgatgggtattgaaagcttttcgccaatcattaatcagccggaggctgcgattcttggagtgaataagatcacgcctactccggtagtcattggcggagaaattgcggttcgcccaatgatgaatttaaatctggtggcagatcaccggattatggatggcgcttatgcggcgggttatcttagaagggtgaaagacttattagaaaccacagaatagactatacgcagatgataggagtattactatgaatattagtaaagttattatttttattttggttttctttatgctgcttggtgtggcagaccttttgtttttcaagaaacgtctggggtacgctgacgagtttgaaaaaggtattaatacgacgggtccgttgattttcagccttttgggattggtttgtatggcgccgttaatgggtcaggtgttggaacctgtacttgcgccggtgtatcaattttttggcggcgatcctgctatggttgcaggcactttgctttcctgtgacgggggtggttatccgctggctaaaaatatgacgaatgatccacaggttattcgtttatccggtgtgtatttgggttctatgctcggttgtacaattatttgctctattccggtttctcttggagtagtgaaagacaaggataaagctgtattttctgagggtattcttgctggtgttattgcaataccatttgctgtattgctttgcagtgtgcttgacggaatgccaattaaatttactttcatcaatttaatcccttcgttgattcttgctgtgatattagtgattggattagtttttttcacgaaggtaacgattaagatatttgcattgtttgcaaagttgattcaggtagttaatatcattggagctgcaattgcgattggacagtcgcttacaggtattactattattcagggaatggcatctacttctgagcagctgggaatcttaggaatgattggtgtgactttggcgggggcatatccgatggttcactttgtgacaaaaacgtttgcaaagcctatgaaatccttgggaaaattcttgggtattaatgatgtgtcagttgccggaatgataacgactttggcaagttctttcccagtatatgatatggtacaagatatggatgtaaaaggaaagaaaattgtttctgcttttgctatctgtgcttgctttgctctcggagatcatcttggatatgtcgcagctaatgactcagaagctgttttccctatggtggcaggtaaaatcgtcggcggtatactaggcattatcatagttctcgttattgataaagtgaaaagaccagaaaaggtgaaaagcttagaggcgtagaaataatatgggaaagaaaaacagttattcttattttgtaaacaaggaatgtcaatattttccttgtcacaaaactactgcaggcaaaggagaatttaattgtctattctgttactgccctttgtatgctcttggtgaaggatgcggtggaaactttacatatacagaggcggggataaaagattgcagcaattgtcttttgccgcatacggacggtggatatgattatattacccataatttcaaaaaaatagttaatatgataaaaaaatcggaaaaggcagaagtacatagccgctgaaagatatcatatatgtagatgcaggaaggagtgttatgaagtataaaactttatacgtttcagatttggatggaactttatttaacagtaagaaatgtgtatctgaatataccattcaaattttaaatcagtgtattggaaagggaatgagatttacagtggctacagcacgtatggcatacggctgtgattaccgtctttcagaaatccgtttgaatacacctgggattcttacaaacggcgtatttctgtatgacttctctaaaaaggagattgtttccactgagtgtattaggagggatagtgcaaaaaaagcagtagacgcctttggaaagaatgggttatcctgttttatatatgtatatgagggcagtcagatatctatcttttataatgataagaagatggaggaacaaacccagtattatagtgaccgggctatagaaagctgtaaaaatgtgtgtttgacagaagacttggacgtagcatttaacagtggtgaagtcgtatatctgacgtatacgggagaaagggagatgctggagaaggtatgtaaggagttggatcagattgaacatttgaattattccttttatctgaacatatacagcggtttatactgcctggaggtattcagtaatactgcaaataagaagaatgccctgctaaaactgaaaaaaatgatggaatgcgatcaattagttgtatttggtgataatctgaatgatcttcctatgattgagattgcggattacagccttgctcccgcaaacgcactagatgcagtaaaggaaaaagtaaattatgtgttggatgactgtgaccatgatggagtggctaagtatctggctaaagtttggttaatatagtaagaattaaaaaggggctgtgaaaaaacagtcccaataaaaaagaggattttcaatacacattagtggttgaaaatcctttttttgcggtaaaatttatctgctatgaaaaacaaaactaccacttattttataaatatcataataagaggatgagactacagaaagcagcctaaaatgaaaaagcagaaatctgtggggaaggagattttatgcccttttatgattagaaaaaatattcctcatccatggataacttaatatccagagctttttggtgcattcctaccatcatgtacttatataaatcatctgcgtaatgtaattcaggaagatatctttctgggattgttttcatacaatcagaacgaataactgccaaatctgatgcctcaacaagctgaccggttaaaacgatactggacggatcaatcatagaaataatggcaataataacccgtgaaatgattggccgagccgtttttttatcacctaaaagcaaaagaagttctcttggagacagctcaaaggggagataacctatattgccggcaaacaggtgagatccccggattagcgtgccattatatatagttgatatcccaggaagggctttggatggaaagttagccaaagttaatatttttttagagtctttactcttaatatagtaaccataactttttaagtgcatatcgttttccaggtgaaccggacacgaaagcgcagtgctgagtttgttaacaattgctacattttccagttcctcaatatcacagatacgaataattccatgatctggtacacagcagccagaaattattacctgagaaatatttggccattgggctaaaattgtcatagattctttttttattaagtcataatccagataatcataagtttggatatgttcttccagtatattgccggcaaaagagagaacatttaaaataagtgtttttaagccttttgttatttcaaaggaaatacaaagaagctgttcgttctgtgtatttacatgatataccatagtacgcggaccgatattttgcagctgctttttttctccgattatttcattattagcggcaagttcatttaacagagtattgcaggtagagagactcaggcctgtttttaatgagatatcttgtttgctgtattctttgttactgtataacaaacgacgaataagatttatatttaatttacgaatatcagaagaatctttcataattatattcctttagatatattttgaagttatgcaaaagctacatatactcttataatatacaattactgagaaaaaagcaaattttattttatagaggaaaaagttaagtttacaccagtaaaatattcttttgtatgcctttttctgttatgataagagaacagcaagttctttatatttataagaagcagctagattccataaagtgattcttaaggatatatgtcaatgaaatcaaaagtaaaaccaggaatcaatgatcttcagacgatgcaccctcatacagcggctcaatggcacccatataaaaacggcagacttaccccgaaagaagtctgcgcctacagtggcaaaaaggtctggtggcagacagaagcggagcggtacggaaagcttttcactctggaatgggacgccgtcatagcaaaccgggcaaatggctgcggatgtccttatacatctaaaccgccgaaacggctgttaaaaggcttcaatgatttccagtcgaccaatccgcagacagcagctctgtggcataaaggcagaaacggtgatacaaaaccggatatgattttcgaacataccaatagtaaatattggtggagtcatgtggcttataaagatggaaaagagttcgttcatgaatgggaggctatgcctcgtgatgtaagcgtggacagctgtccctactgccatggaacaaaagtgatggccggttttaatgatttggcttctgtctgcccggagatagctgagcagtgggatactgaagcaaatggccggctgacggcccgggacgtatcttcgggcagcaatcagtatgcctggtggagctgcagtatgtgcggatacaagtggagagctgtgattaacaacaggagcagaggaacaggctgcccccgatgtgcggtgaggcactgtacctcttatccggaacaggcgttgtatttttatattagacaggcttttccaggctgcagaaacagggatacagagacattagacggtctggaactggacctttatctgccggaggagaacattgccattgagtataatggcctttgggctcacagtttcagggagagaaagttatgtgatgcgagaaagctcagcctttgcagggagaaaaatattctgcttatccgcatatgtgaaaccaggacggtaaatcgtcacgtgcagggagagcacctaatcgagtgcgtggcagatggtacctgcgaatatcttacctatgtgatggaatgcttgtgcggggagcttagtatggcaggctgcctgccggaacctatccgggtgaatctggaacaggatcggcagaggatttacgctcagtactgcagggaaataaaaagcaagagcctgggggaaaagcatccagagttattagaacagtgggattatgaggggaatggaaatttatctccgtatgctgtttatgcctgcagctctgtaaaaatatgctggagacattccatggaaagagaaggtaaggtatttgaacacagatggcagagcactgcggcggggagaagcaaagagaaaaggggatgtcctatttgtgcgggcaaaatcgttcaggcaggatttaatgatttagagacagtcgcgccggactttttaaatgagtgggattatgaaaagaatgaatgcaatcccagggagattacggccggcagttcccaaagggttcactggaaacatactgcagtttttcagggcagagagtttctgcatgcctggaaggcaacggtaaagtccaggatgcagggcaacggctgtcctgtttgcgacagtaaaaggattctgtctggatataatgacatagccacaacacatgcagaattaatgaaagaatgggattatgagagaaatcagttaaagccttcggaaatttcctatggatatgataaaaaagtctggtggaagcatacggctgaaaaggatggaaaagaatattcacacagctggcaggcatcgcctaacagcagaacaaaccgaacatcaggctgtccttactgtgggaataaaaaggtactgaaagggtataatgacctggaatcctgttatcctgagattgctgaaaagtgggacagaataaggaatgcgccggccctgccggatggctttacatctgcatcagccaggagggtctactggaccgacagagttaagcctgtgaaaatcagcgatcgtaccaagtatataaggatacaggataagaagtaaaaggaggtgccacccataaccacatacaaaaccaatgacattgcccgtattataggcatccatgtgaacaccgtccgcctgtacgaagcctgtggactgatcccgaggcctgaacgccggtccaacggctaccgcgtattcacagaccttcacgtagagcaattcaagctggcccgtgccgccctgaaagtagaggttcttcaaaacggcctccgcaaaaaggcagtggatatcataaaaacctctgctgcgggcgagtacgaagctgccgcagaaaagacagcacagtatatcggacaagtgggcagagaaataaaaaatgcggaagaagctataaggataacacagcacattctctcggggaacagcgaatgttctcccaattcctccctttcctttacaagaaaggaggcggcggagtatcttcaggtaaccatagatacgctccgtaactgggaactgaatggattgtttactgcgaaacgcaggaaaaacggctaccggatttatacaggccaggatatggagcgcctgaaaatcatccgttcccttcgatgcgcaaactattctctttcctccattttaagaatgcttcatgtactttccgcggatcctgcggccgatatcagagaggctattgatacgccgggaacagatgacgacattatcactgcctgtgacaaacttctcacttccctgcatgaggcaaaggaaaatgcatattttgtggccggacagattgaaaagatgaaaaatatgaccaccggaaccctacagtaaaacaccatactttcggaagatgatactcttgatacacttcaaaataaaggaggtaaaaagagatggatgaaacaatccggatttccggtctaagcaaatcttatgccggaaataaagtacttacagacatcagtttatccgtagcggcaggggaggtatacggtctgctgggggcaaacggagcgggcaagagcactatgattgagtgcattttgggtacccgcagggcggattccggggcagtccgcattctgggattagacccgtggaaaaacagaaagcagctgtttgaagaggtaggagtacagttccaggaggcacattacccggaaaagatgaaagtgagggagctgtgcgaagaaaccgcctgtctctatgagaagacggcagactgggaaatgctgctggagcagtttgcccttggagataagaagcatgcgtttatccaggaattgtccggcgggcagaaacaacggctttttattatcctggctctgattccggagcctaaggtggtgtttctggacgaacttaccactggtctggacacgaaggcccggcgcagtgtatggaaaagtctgctgaggctgaaggaggaggggctgacaatttttctctcctctcattttatggacgaggtggaggtactctgtgacagaatcggcattctcagagacggaggatttatatttaccggtacggcggaggaggccatggcccagagctgctgctgcaggttagaggatgcctatctttggtttaccggggaggaggagacagaggatgcataagtttattaccatgctgaaaacggaacttaaactatctatccggggaatggatatggttatcttcgctctctgtatgccggtggcggtgaccctaattttgggatgcatgtatgggagtaagccagctttcgaaggggcggaatatacctttttggaacagtcctttggggcaatgtctaccattgcggtctgcgcaggcggtgtgatggggctgccgctggtcatctcagattaccgccagaagaagatcctgaagcggtatcaggtaacccctacaagccccgtgcttcttctggcagtgcaggtggccgtctatggggtatactctctgctgtctctagttttggtttttcttgtctcagctttatttttcggtatgcgtttgccgggatcctggggaatgtttctggcggcctatcttttggtgatgctgtctatgttcagcatcggtgtgatggtgggcggggtttcccgggatatgaaaactgccagtattgcggccagcattctttatttcccaatgctgattttttcaggggcaacccttccctacgaagtaatgcctgaggcactccagagggctgtgaatcttatgccattaacccagggaatcaagctgctgaaggcggcatctcttggtctccctatagaatctgtgggaatttcggtaattattatgatcgcgtgcgcagtgatctgcggaggaattgctgtccgattctttcgctgggagtaggaacagcgaacagataatgtgcagttccggctgttgtttttttattgctttttccggtgtatactagatgagaggtgatggaatcatggggtacagaattttaatggtagatgacgataaagaattgctcaaaatgctgagggactattttgaaataaaaggctattccgttattaccgccgagaacggctgggaggcactggagagaatcaggatgcagcctgatattctgctgctggatgtaaacatgcccaagatggacggacttgaagtgtgccggcagatacgggataaaatctcctgtccaatcatttttctgacagccaaagcagaagagcaggaccgggtaaatggacttatgtccgggggcgacgactatatcctgaagcccttcagcttaagagagttagaagccagaattacagctcatcttaaacgcgaggaacggcataaggcaaaaccagattacaggttcagagacggcctgttgattgactacacggccaagagggtgcagataggggaaaggtatctggaacttacaaagttggagtacgatattatggagtttctttctatgaatccgggacaggtattcagcaaggaacggatctacgaaaaggtctgcggatataacggcgagggggacagccgggtgattactgagctggttcggcgtatccggaataagaccggtcagtttacagagacagaatatatagaaacagtctgggggatgggctaccgatggaaacgataaggaatttatcaataaggaaaacaattgtactgtacctgacggtaagcttaatcctgggatttcttaccggggcagctgtcatggggattgctgaacaagcccagcggcagatatggataaagtatattgatgaagatgcatatgtgaaggcaatgcagaaagaagggaagaattttactgtcgatgtggccagagtcagtggtgacagaatgacaaaaatagatgggatctactctgagctgtgtgattttctggaaacctatagtatcctggtagcttgtttttttagtatgattgtagctgttatactgttttacagggataagataaaggtacccttgggagaactgacagacgcatcggagttaatcggaaagaacgagctggattttcagattacctatgacagcagggatgaactggggcggctgtgcagggaatttgaaagaatgcgtgcgtccctggcggcaaacaaccggaatatgtggaagatggtggaggaggagaaggcgctccggtctgccattgcgcatgatatccgctctccccttgccgtcctcaggggatatcaggaaatgctgctggagttcatacccgagggcattctcgaacagaagaaaatcctggagatgctgcaggggggaatggaacagatagaacgcatggataagtttatcggcaccatgcagaagctgtccagacttgaggcccgcaggatagaatgcacggagtttacgctctcctcccttacggaggaagtacgcagaattgcacagattcttcaaaaggaggcaggcagggagagctttgtcatacaaacatcaccagacaaaaagattgcggcagatcgggaagtgatactggaggtgacagacaatcttttatcgaatgcttttcgatatgccaagagattggttcaagtggaaatccgggcagaagggagagaattgaaaatctctgtatcggatgatggaagaggatttacagaaagtcaggatcaggtcacaaaggcatattatcactctaacccgcaggatgatcttcagcacttcggcatgggaatgtatatcagtcgtgtgtactgcgaaaagcatgggggaagacttttagcatcaaataatagggacggcggtgcagtggtaaaagctgttttcaaaacaggggaatagagtaatgctgtgtgcaggagaatcagaagagattttcctgcattgtttttttgttgagaatttcccgttattctagtagtaacaaaaaggaaaggcggggaaaaatgaaagcaataatcaaacgggaactgaaaaattacttaaaaaatcctgttttatgggttggcctggtatttattatctttcaactgtatcagacgctgaatccgtacctggaaattcgttattaccaatcggaaaaagatattgaggcactggaaccggagaacattgcggatgctgatatcacagagggttatgtgctctcgtccaaagaagaacagatggcactggcctgcgaaaagataaaaaaggatttagcagaggcagaaggcattacggaacaggaggcggaccagatcctggaggatatgagacacaggggattgtccatagatgagatggaggtcgaactggcagaaaagtatgaattttatggaaaatacggggtgaaatattattacgatatctcagaataccacaaagccggatatgaggaggccaatgcatatatagcctccaatctggaggaacattccttttcctactatttctcacgaaagtttgcagacttctgcgggctgtttatgggatttttttcctccgtgcttttggcgttcttatttatccgtgattcaaaaaaggatacctatgaactgctccacacaaagccaattagctctggggcctatgtgtgcgggaaaataggaggtggattctttgctatgcttggtgtatggggaattcttacaattatttttggaggactctgtgaattctgcgggcgaagagccggcttcccggtgagcatggcagattttataataacagcgtctgtttacattctgcccaatatgctgatgatcgccagcatttacggggcagctgccctgatctttaaaaaccctcttccggcagttccgcttttgtttctatatttgatttactccaatatgggcagcataggaccggacggagaatatgggtattttggaagacctctggccattatggtacgctttcccggaaagttctttgagacagcgccgccgcctctggcacttttgaatcagacatttttatctgctgccgctgtactccttatagtactcggggcagagatatggaaaaggaggcgattctattgaagcaggagatcaaaatatgcctgcctccctataagatggtgtattcggttatgttttttgtgattttaagcctaatccggggaatcaccctcacaggcgaaatcggcggggccctggatgccaatgcagcgcttttggcagttgtattctgtgctgagacttatgtcatggagcgcagctccgggcgatgggagatatttgtcctgtatcccgagagaaacagagcaaaggcagtcatgagaagactgctgatacagaacgtatacctctgtgtgctctcctatattggttttttcttttttttctggcagaagcctgtgcttttgtccgataactctctgctcttccagtatgggatgtatatgcttgctgtaactgggacaattctgttctggagcaccctgtccgtgacaatatccaaccttattggcagccagtggggaggaatcggcatctgccttgcggtttggatgatgataaactccacatttggagataaaacgctggggatattcaatatttttgcctacagcttccggggaacagaggagcccctggacctgagctggttatgggggaaggcactggggatcctgctggcagcagtaatggttggaatgacaccctatatcttaaagaaaagaggctgagtaaatgagtataaaaataaaagatgtaacagtaacattcaaaaacggagtcacggcagtaaaccatgcaagtctggaaattcccagggggatctacggactactgggtgaaaacggcgccggaaaaaccaccttaatgcgtattcttgtcacggtcttgaagccctctgagggtagtataactatgaacgggatcctgtatggtgaacggaattacagaaaaatacaggagaaaatcggttatcttccccaggaactgaatctgtatcccaacctgacggtgagggaatgcctggagtatatgggggaattatccggaattgacaagacagaatgcaggaagcggatagactactatctggaaaaaacaagtttggcggagcaccagaaaaagaaaaaccgccagctgtccgggggaatgaaacgccgtgtagggcttattcaggccttattaaatgaaccagagtttttaatcgtagatgaacccaccaccggactggacccggaagaacggatccgcatccgcaatcttcttgtggatttctccagaaacaggaccgtcttgttttccacccatgtagtggaggatctggccgcaacctgcagtgagctggcagtaatgaagaaagggacttttctttacagcgggacggtgcaggaactggtgaacagtgccagagggcatgtttggaactgccgggcaaaagatatagaacaggcagcggaaatagagaaaaagtatcatgtttctgcaaaacagtatgtgaatgacggactgcagatgaagatacttgcaaaagagaaaccggagacagagtgtacgccggcggagacaacactggaggatgcttacctctatatggggatttccaggaaggattgaattccaaagggatataatatcatggggctgctgcaaaatagaaacgtctattttgcggcagccccagtgtgagtttttactggtctagactgctaagctttattttgaatggcagtgacagcagttttgttcgtcttttgctccagttgaggactagcagtaaaagtttatttatattataatgataattatatagtttactaacatgccctttgatttccttcagaatcgaaggggagttcctggaggaaggtgtgatacctgtgaaagctctcaagagaataatttgtttttgtcttactgcatttgccgccctgttaataatgccgatttctgtggaagctaaagaaaaattgaagatcggttattatgaagacggagactatatgagccgtgataaggacggcagttatgttggctttaattttgaatatctgcagaagattacacaatatgcgggatgggaatatgaggttatagacggaggaagctgggatcatacatttaagatgctggaaacaggggaaatcgatattttaccttctgtttattatacagaagatcgggaagaacaatatcttttttcaaagctgcccatgtgtaatatatactccacgctgaatgtgcgtgtagacgacaaccgctatgattatgaagactatgagtcctttaatggtatgacagtgggagtgatcgaaaacagcgtggacgctgcctgctttgttgagtactgccgggataataacgtctctgtaactgtcatcccctatcaggagacacaggagctcctggatgctctggatgacggtacactcgacggggtggctattacatatctggggaaaaacagtatctttcggtgtgtagcccagttttctcctcagcccctttatttcgctgtaacaaagagccggccggatctggcccaggaactggatgctgctatgagtacgattaagctgcgggatccttattatgaatcccgactctatcaaaaatatttttccattaattcactacaggaccctgtattcaccagggaggaagaggagtacatagaacaggtgggagcaatacgggccgtatatgtggattcggatgcacccctggaatataccgataagaggagcggccagttttccggggtagaggcagacctgtttcgcataatcagccagaagtcagggctgaagtttgaatttctgtctgtagagaactgtggggaatcctatcaaatgctgagtgaaggagaggcagatttactgtgcagtgcagacaatgactatctttggtcagaaaagaatcatattgataccacaacctattatctgaaagctcctttggtggcggtcagcacaggtaataaaactaagggtaaacggattgctctgacagaaggccgttatatagctgagaggatagcaaaggacaacccggaagcagaaatactttattacccgtctaatcaggactgttttaatgctgtgaaacaaggagaagcagatgttacgtataccaatacgtatattgccagctatctgatgtccgatccaacatattcaagttttaacacagtcactctaataaattattcggaggatctgggtataggcatctctgaagaggcagatcccagattgttttccatccttgacaagtgcatccagtatattcccagtgagcagatggatacctggctaatgaataattctaatgccgccaaatcaattacttttaagcgtatcatacaagaatatccggcagagagtgtggggattacacaatgtcattaagttaagctgacattgtgaaagaggcttccgacacaatcaaaacggatatatcattgagaagtggtatgtccgtttttgtatgttttaaaaaaaatacttgacaaatttcagctcatatgcggcgcagcccttagaagaggaggtacagcatatgaatacttttgctgaaaatttaaaacatagtctgctttcaatgattgatgaaatggaattctacgagcttgattgtttcgttcataatccggacaaagattttaaacgacaacgaaaattcactttttcttctgtcatgcgttttatcttatccatgggaagcgcttctttaggtcaggaattattgaagtattttcactacaattcagatttcccctctgtttctgcatttgttcaacagcgtcagaaaattaaaccggaggctttctttgagctttttcgccgtttttctttaaaacatgaagaaatcaacctcttccgggaatatcgtctgcttgctgttgacggttcggacatctctttgcctctgaatccctcagaaccctttgcttttcctgagtccaaatgttctatgcttcatctaaatgcattgtttgatattatgagcaggcaatatgttgatgcaatcatccagggtaaacatgaatcgaatgaaaccgctgcaattgttacaatgacagatcgattaccggatcagtatcctgtcatcattgttgctgacagggggtatgaaaactacaacttctttgctcatgtggaggaacgcttttttgattatgtggtaagactgcgtacttcaaaaagccgcagcatgtttgcagggttaaagctccctgatggcaagccctttgatattacaaagaatatcgttattacgcgccattccacaggaccgtatgctgtcgataaagaaaaatacaaatatatgacaaagcagtcgcgatttgattttatccctgactgtaagcatcccgactatgaaatgcttattagatttgttagtttcccgttaaatactggagaatttgaagtccttgcaacaagccttcctgaatcagaattccctgttagcgtcttaaaagaaatctacaatcttcgctggggaattgaaacttcctttagagaacttaagcatgttgtaggtttagctgcttttcatacaaaaaaagcagactgtgctatgcaggaaatctatgcacgtctaatcatgtacaacttcagtttgcttattgcaggcaaagtgatgatacctgagcagccgtgccgaaaatacaggtatctgattaactttgctcaggctatcaggatttgtattgagtatttccgaattcacaacagcagtccgccttttgatttacaagctcttctctcacggttcatccttccagaaagaaaaggaaggacctatatccgcaaagtatatccgcagggagcaaaagctttcaactacagattaacataaatgaaaaatgggcacaagacatttatcgcctatgatggtaagcataggtgctcttttgatgcttcaaaacatacaaaaacggacataccacttctcaatgatatatccgttttgattgtgtcggaagcctctttcacaatgtcagcttaacttaatgacattgggggattacagccctgatttttttaatccttacagggataatggcctatatagccattataaaatcaaggaataataaacgctttcaggtgctgctgtaccaggatagagtgacgggaatctggaatatcaataagttccgtgaagaggcggaacggatacttaatgaggacaaagaacattcttatgcggtactgtatatggacgttaatcagtttaagacaattaacgacagtttcggatttaaagaaggagatgagcttctccggcttttagcaggtattctcagccggagcattgtgcctggggaatgctgtgcaagaatgtcagcagaccattttgtgatgcttctgcaatatgagagctgggaaaaactgacgtgccgtacctcccggattgcccaggatatgaataatgctataaaggcaaagcaaaaatcctattcaattcaccttatttttggggtatatattgtagaaacaacggacaaacaggatatctccctgtttttggatttcgctaattacgctaggaggagcgggaaaaatttcaggggaagcattaccctaagatatgatgaagctatgcgccaggaagaactttggcgcaggagactatccgacattatggagcctgctctgcagaacggggaatttgtcccctatttccagcccaaagtcaacatcttttccggggatattgtaggggcggaggctttggtccgctggctgcgacctggagaaagtatgctctctcccgggtcctttatcccattttttgagagtaatggattcattatagagatggacttatatatctatgagcaggtatgcagaagtattcggaaatggatggatgaggacaaaccggtgcaccctgtttcctcaaatttttccaggctgcactttaaaaataaacatttcccggatacgctctctcatattgcggatgcgtatggagttcctcataaatacctggaggtggagatcacagagaatatcctgatggatcagattgaggaggtacagaatcacctgtaccggctgaaagaactgggctttctaatttctattgatgattttggctcgggctattcatctctggggatcctgcagcagctgtcggtggatactattaaactggatggcagccttatcggccagagccttcaggaaaagcgaagacagatcattgtagagggaattataacgcttgcaaagggattgggtattcaggtaatctgtgagggggtagagacagaagaacagactgagacattaaaggtacttggatgtactactgcgcagggattttattatgccagacccttacccttggaagaatttgaaaagatgctgtaattgtccctgggatccttctgcggaataaaagacgcttttttgtggcccctgcagctgggaatgtactccacaggagtacatttccagtcccagaattttgggcgtattgctgcattatgcgatacaaaatctctttttattatacttttcaatctcttcacagactgcttcgtagactcccgggtaagaacagtcgggtcctcccatgctggtacacggcaggaagtacttaggagggatttcatcgcagatctttttgacctgagccgcgatactttcgtgggtccagtcttccctgtcaacgatactgttatcgataccgcccatgaaggaaatctgtcctccgtaggttttaaccaattctggaaggttattggtatggatggttccctggtggatgtcgatacccatttctatcatagaaggaatcagatttgccacataactgtctgaatgatgtacaatgagacatccctgttctttaaagtagccataaacttttttatagaccggaacgaaaaattcctggaacatctgaggggagaagaatgaggagtactgtgttccaaagtcatcatggtggaagacaaggtccggttttatatatttcatcaattctttggcatatgccagttcccaatcagccataaaatcaaataattcatgcatagcctccggctcttcataaaaagcgaccattgccggttccattcccattaaataatttattttttcaaaaattccgggagccataaaggcggcgacgaactgttccctgcggtcaactgcgtctgcctgtgccttggctgtttcccatacttcggggggatagacaaccctgggagccctcacagtttctttctacttggtaatatcctttagcgctgcaagaccattgctgtggatggggagcgggccggcacatccctttggaaaggttacggttacgccccactggttcataacggtttcccctggcttcatggtataggcaaagccgcctatgtgtgtaaggatggggtcaataataaacgcaaaggcttcgtggcagtttacatagcggtcgggatgcccgccctgaatggtttccagcagattttgtcgttttgtaagcataagcaaatcctcctttaatatgattcgtacattttctatctggtcccattataaggggaagggggaagataagtaaattctacaaagaaattgactttgctgtaaaaagttcctatactttatacagaacatatattcgatgggaggtgggtcaatgaggataagtatggaaatcatatatgagaatctggcagagttcaggccgtccggaagaaaaaggaggggatggaatgaaatgagatatctggggttcacgccaatgggaaaaaagatgagggacctggctgaggaatttgtaattctggggcgggcagaggagctggaggcggctgagcttcctgaaaaaagcggtattatatgcctgggcaccccacggggaactttggataaagcgcaaaggtggatccttcttccggaaactgcccggtgggaggaagtatgctgtgcccttttaataaccttccggaagtatcagctgtgggaagaagcgctgatggaagcgttgcggaggaatgaaaggattgagagctactgtcaggccagtgtggatatttttgagaacccgatttttgtgcatgacggggattttgagattatagccagtgtaaatgagatgccggagcaggtgaagtggaattatgaatctcagacagggaagaaaactgttcagatggaaaccatgaacgagtttaaggtctccagagagtatcaggacagcctgaaaacccggggagctcagatttttccaagacagcagtttggatacagggggctgtatgtgaatttttggatggaggaaacctttctgggaaggatatgtgtaaatgaactgggaagagaattcagagagagtgattatcccctgctggaatatctggcagggcatgtgcagacagccctggagagaggctgccttctgcagtcagacgatcccagggacctggaacaatctttttatgaactgctccagcatggacacaccgaggagactgtcttgaaaaagcgcctggaatatcagaagtggaagcctggtgaccgtttcctgtgtatccgactgctggtaagcagcagggacttttccactcatgcggtttattttacctgccggaggttggaaaatatgtttgccggtatctacgcatttcactatcatgagggcattgttattgtcttaaatatggaaaagataaatagtgatataagtgaattcttccagaggtttgcagtatttatgagggaaggcctttttaaggcaggaatcagctgtcagggggatgactttatggaactgaagttttattatcagcaatgtctggcggcattggagatgggagaaaaggaaaatcctatgttttggatgtacaagtttgaagactatgtactttcctacttgttttatcagggcagcaggaaactgcttccccagatgtactgtgagcccggactgctgaaactgaaatcatatgatgaggagcacagtacagagttctttaaaaccctttatatttaccttgttaatgacaggaatatcgctcatacttccggcagactgtatattcacagaagtacgttattgtaccgcctggaaaagattaagaagatattggagcttaacttggatgagtacaaagtccgtttccgtcttcttctttcctacgaaatattagaatggactcagaatgaataagatccgccggtttacttgagttttttcctataataacgtattattagtataataggcaaagagcgggaaggcggattttaaatggattacgtagaggagtgctgcctggcatttacagcaaacaacattaattttcttatcccggtctccagggtaaagcgggtatgtgacgcaatacgcgggacagcggaaggaaaagatatgccggttctgaactttcctgtgatagcaggcagaaaggaagagaggcaatgggattatatactgatcattgagatagggcagacagcgttcggacttttggcagaagagatcctgggggtccgtgtactggaagagaaggaactgctccctttacatcccccggttctgaatgaaaggaaccaatatctgcaggccgtggcaaagctgaacggggatgatggaaaagctgaactggggtatctgctgaatccagaacagctgtatcaaaggatcataaatgacagcggcagtccgccgggcagctcgtagaaaaggacgggatatggaatatataacggtaaacacaggtacaaagattgtttatattgaaaagaaaatgacagaagcaattgtcagagctcctgagatccttacagttccggaaggagatgataatcttctggggctttcaatatatcagggccgcctggtaatctactatcagatgggagacaaaaagtcttactcttgcggaattattataaaggcagggggagaagcgatggggggaataccagcggttacagttggcgaggaagaggcagatccctcttctttaactatgctgatgcagggagtatggggaaagaaaagtgattaggctaaatgaaaaagaatttgcagagattgttgcatatatgcgggagtactatggaattaacctggataaaaaaaagactttaattgagtgccgtctgacaaaagaactgcagagatggggactttcttccttcagggaatatctggaactgctgaaaagggacagaacaggaaagatggctgagggcatagtgaatcagctgactacaaactatacttattttatgagggagccagtgcatttttctgtgttaaaagagaagatatttccggaacttttcgcgcagattcagcacggaatctgcaatatatggtgtgcaggctgttccacaggggaagaatgctataccctggcaatggttcttcaggattataaggaagaggtccggcagattccaagtgtaaggatacaggcaacagatatatcaagagaagtactggaaaaggcacagaagggggtgtatcccttaagagagctggagcgtcttccggctgtttggaagaaaaagtactgctgtattgtagataagaaagtattccaggtgaaagaagcgctaaaatataacattacgttccggtatcagaatctgatgcagacgtttccggcatcagaaaaataccatgtaatactttgcagaaatgttatgatttattttgataaggatgccagaaaagcactcattgagaagctggaaaacagccttcatccaggtggatacctgttgatcggacatgcagagctattaagcagggatgagacaaggctggagcagacggctcctgcggtttaccgaaagaaaaggaagtaaaagaagcaaaggagaggcaatgggcaaaaaaatattaattgttgatgacgcgatgtttatgagaaaagtcatccggcggtatctggaacatgaaggatatacggatattctggaggcggaggatggagagcagggatataagctttatgtgaaccataagccggatttggtgcttctggatattacgatgccaggcaaatcgggaattgaagtgcttgaggatattttaaaagaagatccacagggaaagattattatgtgctctgcggtggggcaggacatgatgattcagaaagcactgataaacggggcggctgattttatcgtaaagccgtttaaagaggaagagtttatcagagtagtcaacgcaagtctgcagaattaaaaaacggcgaagaggaagagaccatgaaggaaaaattcagaaatcttaaaataggaaagaaactgcttctggcttttgggacaatcattattatgtatgttttgacggtatccatagctctgtttaacatcaggactctggcagatcggatggaccagctttacaatgagccctttgccaacgtgcagtcatcccagatggctatggctaatctgcagaaggtatccaaaaatctggccatgctggcaggtacagagaatctggtggatgagcaggtatatctccaggaaaccaaagaaacagtgacagaggtggaagcaggtatggaggcactggccaccgggtatgtaagcggtccagaaaaggtagaggaactaaagagcctgttttcacagctgaaattccccagggacgcaatactcacagcaattgaagaggacagggatgaggatgccctgaacatatataccaatgaatatgcgcctcaggtcacaaaggttatgacttgtctgggagaggttgtggagctttcgtcagaggacgcacacaacagtcttttagaggcaaagaggataagcagacagatctggacgctcctgatccttctggccgctgttattttacttattacaggttttctctggattacaattacaaaaagtatccagaaaccggttaatgagattaaaaaggctgcgaataccattgcaaacgggcagctgaagactgagctgacatatcggtctgaggatgaactgggccagctggcagatgacatcagagctacggcttcagctttgaacttatatgtatcggagataaaaaagggcttaggagaactgggcagcggacgtctgaattaccgctcgcccatcagctttaagggggattttatagccttaagcgaggggatgaatgagatcggagaactgctgcgggagtctatcgtacagattggaaatagtgcagagcaggtatttggaggcgcggaacagatctccaacggggcgcaggtgctggcgcagggagcttcagagcaggccagctccattgaagagctggctgtcagcatcaatgatatcgcagacggcgtaagagataatgcagacggggctgtcaaatccagcgaactggctgcttcggtggggaattacctcatggagagcaataatcagatgatgaacctgatggagtataaccggcagattaaaaagaattccgtagagattacgggaattgtaaaggaaattgaggatattgcattccagacgaatatattggcgctcaacgctgccgtggaggcggcaagggcaggagaggcaggcaagggcttttctgtggtggcaggagaagtgagaaggctggcgtcaaagacatcaagcgcttccagactaacctctgatctgagcgagaagaataaagaggcagtggaagcaggtatggaggcagcgaatgacacagctaaaaccctgaaaaagtctgtggacggagcacaggaagtgaacaagatggtaagtaagatttcccaggcttccgtgcagcaggcagaggcaatttcccagattcgaaaaacagtggagcttatttcggatattgtgcagggcaactcggctacctccgaagagagtgcggcagcaagcgaggagctctcagcacaggctcagatcttaaaagaactggtggaaaggtttgaggtgtaggatatgaggaactatagatgaaaaattacatggatctggatgaacaagacgcggacattttaaaagaactgggaaatatagggactggtaatgcggttacctccctgtcccagatgatgaatcactctctggagattgatactccgagtcttaagattataaagtatcaggagatagccggaattcttcagagagaagaggagatacagaccgggatcatggtagaaatacacggagaacttcagggcatctttttattccttctggatgaggcctttactttttcagttttaaacactattctgggggagaaggagaggcaattgatgtatcttgaagatatagagaaatctcttatctgtgaattggggaatattatgtgcggttcctacataagagcactgtcacagcttctgaagctggagatagatgtagatgtgcccaatctgtgtattgatatgggcggggcaattctgaatattcccctgtcacattttcttgtctacagcgacgagcttctgctgatccaaaatgtattccatatgggcagctgttcgtttatgggacatatcgtatttcttccggaaatgaaatctctaagggcaatcatcggaacgctcagggagtaaagctatgaataaaatcatcgtaggaattggtgagggaaagcttgcagaaggggaacagatccttgtgtcctatgcactgggatcctgtgtgggaatttgcctgtacgacagggcaaagcgccttgccggtatggcacatattgttcttccctgcaaagcagactcactgaatcaggaaaatgcgtataaatttgcggatgaaggggtcagagagctgattcacctcatgacttcacatggggcagacaagaggagacttacggcaaagcttgccggtggtgccaaaatgtttgaaacaaataacagcaagtgggagatcggcagccggaatacagaaacggtaaagcgggttctcaaagaagaaggggtcagagtagccggggaggataccggtaaaaattatgggagaacgattacattttatgcagaaaatggacagatgagggtgagaacggcacgccatatagagattttactgtagataacaatggaggttttaaaatggagaaagaaagcagacagatagtgctggttgtggatgatagcctgctaatctgcaaacagattgaaatagcactaaaagaggagcctgttttcctctgtgaggctcacagcggacaggaggcgctggaaatggcagtgcagtatcagccggatctgattcttctggatgtggtgcttccggatgcagatggttatgaattatttgagcagttaaaggataccgataataatgatgcggctattatatttctgacgtctaaggataaggatgaggacgtggtaaaaggctttgctatgggagcctgcgattatattaaaaaaccttttgtccagggagagcttttgtccagagtgcgtgcacatctgcagttaaagcggcagaaggatgagctcaacagacagaatatggaactgcgctcaagtatggaaaagctgaattatatggcgtttagagatggacttaccggcttatataaccgaaggtatgtagtaggggatctcatggaagatatgaggtgctgtcagatgggagagcgccataatgtgatgatattggcagatattgacgactttaaggtgatcaacgatacctatggacatgacgcaggggacatggctttggtgtgcattgcaaatatcctggagggaatctgcggccggcacagggtggtgcgctggggaggcgaagaattcttggtcgttttatttgaagtgacagaagaggaggcatatgagatcagcgagcagatccgcactgaggttgaaaagtttaagatctatcatgaagagggggaattttcctgtaccctgaccctgggacttcatgcgtatcatgagaacgaaggaattgaagaaagtatcaactgtgcggacagggcgctctatgaaggcaaaagaagcgggaaaaactgcagcatctggtatgagagaaaagagtaagtgaggaatatatgggatatttcgatgatgacgccaaagaaatgcttgaggtatacctgacagaggccggtcagctggttgagcagctgggcggagttctgctttcctcggaggatagaaatgagtttacaggggaggacatccatgcgctgttccgtatcatgcataccattaaaggctcctccgcgatgatgggactgaacagtttatcatcattggctcatactctggaagatctttttggattttacagagagacgtttgggaagatagaagaggcagagccggaactatttgatttactgtttgcggcttctgattacatagaagaagagctttccaggatgcctggggaagattatgtacccgggagcaccgaggaaatacaaaattgggcagagacatatcttagaagagtatcctccggggaggacacggccccaaagatggcatctgaaagcagcagtgaggtgtctgttccgggagaattgaagcaaaaggcaggaacggtagtccgaatcctgttcgagtccggatgcagaatggaaaatgtccgggcttttatgctggtgaggcagataaaggggctatgttctgagcttgagacgtatcctgcagacttagagacatcaaaagacagtgcggggtacatcggggataacggagtatttatccgtttccaaagtgaaaaaaaggatgaagtgattcagcttctcagcaaaggactgtttgttgctgaatgccgggtgatgtgggaatgttcccaggagggttcggctaaggggacggcagaaacttccgggaaaaatgaaggggatacaaaggagtcagagtttcttaacgttaaaacagaccgtttagacaaactccagaatttatccggagaattattgatccagatgcaggcccttgacagctatctgggagaaagagggctgtcagatctgagagagggaacggcccaccagatcagccagctgatcagcgaggtagagcatacggtaatgcagatgaggatggtgcctgtggccagaattgtgcccacaataaggcgtattcttcgggacatatgcagggatactcaaaaagaggcagagcttatcattaactgcggggatatagaggctgataaaagtgtggtggattatactgccgaggcactgctgcatcttatccgcaatgccgttgatcatgggatcgaatcaccggaggagcggatagaagccggaaaaagcagaaaagggaaaattacctttacggtgggaagtacggtaggggaacttcgcatttctgtcagtgatgacggcagagggctggatgaggaaaaaatcagggcaagagctaaggagaggggactcttttggaagccggatgaggaatactcggcacaggaaatccagagttttattctctaccccggatttaccacaaatgctcaggtcacagaatattcgggcagaggggtaggcctggatgtggtaaaaaaaattatggaggatgcgggaggacatctgtatataaagagtgaagcagggaaaggaagtacctttacaatcacggtgcccctgacacttgcaactatggagtgcacaagattccgggtgggtgattaccggttttctctgccgtcccggcatgtattccactttatggattataaggacagcaaaaagaacatccaaagggcaaatggactggattatatcttatttcaggacagaatgcttccttttctggatctgcacaagttttacggtatcgggggtgaaactcctgacacagggattattatttatgtgagaggaacggaaagagaaggatgcatacttgtagatgccatgtatgagcagaagcgtattgtgataaaacagcttccccagctgttcgggagcgggttccgccagcatacaggaatcaacggatgcagtattatgggaaatggaagaatctgtacagcccttgataccgagatcctgatcggcagctatatccatgcgggaaccgtgaaaactgacgaaaagaagacgtattaataaaaataggaaggagacagtgtatggagtccggacacagcgatgagatactttgtattccgggagacaagaggaattatgggatagagcttttccaggtagtagagatatgctcttctctgcagatttcaaaggttccatgtttgcctgattgttatgcaggagtgtgcaattataaggggacgattactccggtggtcaggctttgggaagaggacgaggccgattccggggatagagatatgatggtaattgtaagagaacaaaactttcagatgggaatcccaatagggaggcctccctttataataaagacagctcagtccgagcggatagagaatgtccagacatttttagagtcagaggtatgggcagtgaaagatatctacaaaaaagacggagaactttatctgacaattgatatggagcagaccatggaaaatctgattatttatcccgtataatccagagggaatgtgagggcagaagattgaatcaacaaaatttaaagaaacagattgtgattcccggtattctggttgccttgataagcgtgatattgattggtatcagtatttttatttattccagtattcaggagacccaaaagcaggaaataaagcagaacctgaaggaaattgtctctcagtacagtaatattataaccactaaaatagacggcgacttccagaccctggaggcagtatctatatttgtaggggaaacagatatctcagatttggatcaggttatgaaatatctggaagccgaaagcaggaggaatagtttcctgaggatgggatacgtaactcctgacggaatcggttattttgtagatacagatggaacgaagcattataaccaatatgtaggagatgaagaatttgtccgggaggcatttacaggcagacaagcagtttcggatactatgaaggacagattttcagaaaatactattaactgctatggagttcctgtctatcacgagggggagctaaccggcgtcctgacagctacgagcctctcctcaaaattttcggagataatagagcagaagatatttgagggaatcgcgtacgtgcatgtcattgatgaagatgggaattttattgttcgctctcatcatgtagtaatccaggaggagctgtctaacatttttgacaaaggggaattcccgggaaataccaaagaggagatattatccgatatgcgtgcggggaaagaggcttttgcaaatattgggtatgagggaacggaatactggatggcagtagtccctgtcggaattaaggactggcatatctactgcgtggtaccacaaaaattcttaaacagcaattttaacaccctgctttgggtattcctcagcgtcatgctctgcatggttctgctgtttgccgtattgtttttctatatttaccgtttgattcgaagaagcagggaaacgatggaacagctggcttatacagatactctgaccggtgcggataatcggaaccggtttaccgccgatctgcctggcctgctgaggggaacagcggacaatgcgctggttctgtttaatatcagcggattcaaattcatcaatgaattttttggctacgagacaggaaacaggctgcttaagcatattgccgctgtcttgaaatccagcatagaggagggagagcgatattacagagacagtgcggaccgttttggaatctttatggactataaaggcagagaggaagctgtaaaccgtctggaacagattcagaagcagatcagtgatttcagcctgagccagaaccagagctatcacattatctgcaactttggagtgaaggttattgaggaaaaggactgtggacgaaacgcagatatagatactattatgaaccgtgccatgctggcacttaacagtgttaagggaaatgactataacgctatcgctttttatgatgaggtgcttcaccagaaggcaagaaagaaaagtgaagttgagaataaaatgtatgcggccctggaaaacagagaattctgtatggtgctgcagcctaaatatgcactggacaccggggaggtacacagcgcagaagctctggtgcggtggtataccaaggacggaactgtgtactatccggatgaatttatacctatatttgaagagaatggttttattacaaagctggatatgtatatgctggaggaagcatgcaggtatctcagccgttggcttgaaaagggttatcctgcggtgccggtatccgtaaaccagtccaggctgtttttctatgactctgaatatatggataaattccatgagattgtagataaatatcatctggacccttccctgattattcttgaggtaacggaaagtgttaccatgaatcatctggatcaaattaaagaagcgatggaaaggcttcatgccatgggatttcgtgtatctatggatgatttcggcagcgggtattcatccctgaatattctaaatgagctgtatattgacgagctcaagctggacaaggaatttctgtcgaatcaggaggacagctgccggggagaagtaattatgaggaatattattaatctggcccgggatctgtctatcactacagtggtagagggagtagagaccgaacaacaggtagaattcctgaaatctatatcctgtgatattgttcaggggtattattttgccaaacccatgtcggcggaggagtttgaggaacagtatctgaaaagcagcggctctcaaaactgaacagaaaaagagaggacgcgtaatttataaatctgtatactaacggtaaggagttgagcttatggaatggattgagagatggaatgaggcaatgcaatatatagaagaacatctgacgggagagattgattatgaagaagctgcgaagacagcctgctgttctgtctatcattttcagaggatgtttggatatatggcagacgtatcccttggtgaatacatccgacgcagacgcatgtccctggcggcagtagacttaaggagcagtgaggagaagattatagacgtggctcttaagtacggctatagttcgcctacagccttcaaccgggcgtttcagactatacacgggataccaccttctatggcaaaagaaaacggtgtcgccttaaaatcctatcctccggtcagcttcaaaatcacagtaaaaggagcagatgagatgaattacagaattgaacagaaagaggctttccgagtagtgggagtatcccagcccatgtacaaagagattgagaagaactttgagtttattcccgggatgtggaatcaggctgctggagacggtaccattcccagactggtgggactgatgaacacttctctgaaaggcgtgctggggatcagtgcctgctgcacagacgataactggagatattatatcggggtgccaagcaccgcaccggttcccgaaggcatggaagagtatacggtagaggcctttacctgggctgtattccccgggacaggcgatatgccccagtctatccagagactggagcagaggattgccacagaatggcttcccacttccgggtatgagtacgccaacgggcctgatatcgagttttatatcagcccggatccacagaatgccagctatgaagtatgggtaccagtggtgaaaaaacagtaatatgagaaaagaggatgtgccttgactgcggcgcatcctcttttttcaggtgttttttaaacttataaagtgatagctttctaaaatctgaaaatatttggccagccgctcatagagaggggcagcttcctgtccgaattcctcatctaccatctcccccaatcttataatatcagtttcaccgtcaataaggggccatacaaagctccccagcttatccaggtgaatcttcgttacctttggcttggccaggagcttttgggcggcacggttaaaaaaaccagtgttttctaccaataaggtaatcgtgcctttggaatcctcttcccatcggatagagttattttttacaggaatatattccagataattctggtttatcactttttctttctttttcataatttattttctctctttacgttttctccacagggaaaacttcagcacacttaaaatgaccagcgcaaatacaagcaggcttccgatattggcagcagcagggggcaggccaagtttaccggacagatcgatgacagcgtccagattgaagactgccagtatcgcgagaatgatgcctaccagtccttccccggcaatcatgccggagcagtacagaataccgtcgctgataatcgaagatttctttttctcatcctgctctttctttctatccagacccagacggattaatccgcccgccataatacatgcatttaactgcactggcaggtagactccaatggcaaagggaagtacgggaatccccagtatctccacggctacagccaggaacaccccgataaataccagggtccatgggaggttattctccataacaccttccacaatcattttcattaacatagcctggggagcacccagctggtcagagccaaagccccacgcggcgttgagaagatacagaactccgccgatggcaagggcggctgcgatcaccccgatcaactcaccaatctgctgctttttcggagtagctccaagcagataacctgtcttcaggtcctgagaggtatcccctgcaattgcggctacgatacagataatggagccgatggcaattgccccctgcatcccgtgaatgccgccgtccccggtaaacttcagaataatggtagcgataagaagtgtagcaatcgccataccggataccgggttattgctgcttcccaccagacctaccatacgggaagacacagtggcaaaaaagaagccaaatactactacaataacagcgcccagaaggctgactggaataggcggtgcaagccagatggccagggtaatcagcgctacgccgcccaggataattccaaaattcagatcccttcctgtgcgggtggtatccaagttctgacttcctttcatccctttgatggcatcacggaaggtccttataatcagaggaagtgatttggcaaggcttatgatacctcctgcagccaaggcacctgcgccgatgtaacggatataacttccccagataccgctggcccccttggcagcaaagatttctccgataggttccgttcccgggtataaggtaaggtcagccccgaagagtacaatagcgggtatcagcaccagccagctcaccagaccaccggcaaacatgtaagaagaaattctgggaccgcagatatagcctacactcattacggcaggataaatctgggttccgatttccccggcgaagcccttgactcttaaagaaacctcacttgggacaattttaaggccgtcaataataaacttgaaagccgctgcaatccccataccggcaaatacggtagaggcgttagccccgccttcttcccctgccaggagtacttctgcacatgctgttccttccggatagggtaagatgccgtgttccctgacgatcagcgcattccgcagaggtaccataaacagaacccccagaagtcctcctaagagagcaatcagagtaatttctataatactgggagtctccatcttaccttccgcagcccagagaaacagagccggcagtgtaaagatggctccggcggccagagactctcccgcagagccaatggtctgcacaatgttgctctctaaaatagaattcttgcgcataattacgcggataacacccatagccagaacagcggccggaatggacgcggagacagtcatacccacccgcagtccaagatatgcgttggctgcgccgaagacgacagccagtatcacccccataataatcgaggtgacagtgaactccggcgtgatgcgatcagccggaatgtaaggtttaaagtctttttgtttattcatatcattctctccctttttagtcatactggactattatagcgaaaggtgtagaaaactgcaaggagaaatagaagaaataggctattgacaattactggatatcgcaatattataaaaagagaacatatgttcgataagaaaaattagggggatgaaagcatggaggaagaaaaaacgatcagtgataagaagaaaatgtacctaaattcttataaacaggcggtgatagcagcaaaattaattgaggaggagatagaggagatacagattcataaattgaatccaagttataccatagaggggatgccccatgggaatctaaaaaaggacttatcggattatgttgttttgattgagtgtaaaacgaaagaactgatacaggccagataccgcagaatcaagttgtattcagatatcattgacaagatagaacatatggaagatgagacggaacggaaccttctgagattaaagtatgtgcataataagacatgggaagaggttggggaagcgttaggttactcttaccgacaggtacataatattcataaccgggcattgcaggattttaaaatgtaaacagtgcatagaattgcacataatatctgtggtagtattaggatgtagaaatttgagagataagtatttcagatttctgctgtttttatcaataagacgccctggcctgcgtcttatttttgtgcacaaaggttgatagagacggaagtttagtctgttaagaaagtatggcagatctactagtattcccttctacatttatgctagaataaatacataaagggggaaatattgtgaagaaggaaataagagccaacagtctggatctgactcagggcagtattatacgaggtattcttctgttttcgggtcctttgattgtaggcaatatctttcagcagctctataatacagtagattctgtcatagcaggcaattatatcggcaaacctgcgctggcagccataggttccagcaattcactgattaatcttatcatagggctttttatggggattgctacaggggccggtgtggtcatagcccagtattatggggcaaagaatgaagaaaagatgcagtgggccgtacatacctccattgtactcagtctcatagggggaattatactcactgtggtaggagttaccttgaccccacaaatactccgctggatggggacacctgacagcgttatgaaagaggctgtcgtatatcttaggatttttttcctgggctctgtgtttaatattacttataatatgggggcaggtatcctccggggggtaggggattccagaagacccctttactatctgtgtgctacgtcagttgcaaatattattctggaccttatctttgtcatctgttttcagatgggggtagcaggagcagcgatagccacgattatatcccaggggatatcatctgttttggtaattgtgactttaatgaaagacagggatatctatacacttcgtattcacaaactaaggttagataaaaggatgaccaggcgtatccttgttatgggagttcctacagggattcagtccgcggtaatctctctttcaaatgtaattgtgcaggcttatattaacagctttggacaggatgctattgccggttccagttcatacatgaagatcgacggatttatagtacttccgattatgagctttggtatggcagccatgacctttacaggccagaatataggagcagggaaattggacagggtaaaacagggggcggtaaaaacgctgctgataggctgcgggtactgtgtaataatgtcagcggtacttctgattttcggcagggatgcgctgagcatcttctcacgggatacggcagtcatagaatatggatatctcatgtgcaagatactggccccattctatgttggcatcacgatagcacaggtaatgggaggcgtattccggggagctggtaaatcgatgtctactatgttaattatgataggaagtatggtgggggttcggattctgtggattcagattatgacgaaagtatattttactttggataccgtactttggggataccctgtttcctggttctttgcaaccatgggaatggccatttatgcctggaaagggaaatggctggtgaagcaggaccgatagtaaccatttagaaaaaggaggggtggataccctgagagcagacagtataaaattgtctgctctcagggtttttttatgcccattaatagaattggaggaagaaaaatgttaaatagaattataaaaaatataggattacttatgtgctgcagtgtaatgcttattacacctgcagttactgcaaatgcagctgtagaggagaagactgccggcggaacgccatcagttaaggttcattttttaacattacgcggagctgatacagatgcgatcgtactggaagccaccgacgcagatggaaccaaacacttcggtatggtagatgctgcagatgatacgaatgttcctcccgggggagcgtcgactccgggatatgaagacgaggtaaatgagtatttgactaaattaaacgtcaatcacgataactttgaattcttcattgggacacatgcacacagtgaccatatagggggggctgatgaggtcataagagcttttcatccccaaaaagtgtatatcaaaccctattcagatgataatgtactatcagctaataggaaatgggataatgcatatgtatatgcagatacaataaaagcagcgcaggatacaaatgccaagcttattaccaaattgacacctgtagataatggtgagtttaagttgggggagagtgctgacatagaattgtttaattttgattatgacccgaatgagaagttttacgatatcaatagtgcatctattatcaccaaaatgtctgtgtttggacgcaaggttttattgacaggcgacatgaatacctatacgacatctaacgtagaggatgatgtatacggactggagagtgctttgatcagaatgaatctggtaaaagacattgatatctataaattggcgcaccatgggattgcgggttctaattcaaaagcaatgttagatgaagccaatcctaaatatattgtacagactgggtatctgggcaatataccaaatgctactatggcgcaaattaaccaaaaagtgggctcgaagttctattctaccagttcctattataatttactttctgctattgtatttactataaatacggatgggagtattgaaacgaatatacccaaattcacacccggttttgtcacaacaccgagaggaacacagtatgcggatagcaacggagcattaatttataaccagtggattcttactgggaataaatggtactattttggggccaatggtctgatgcagcgtggatgggtatattttgaaaacaggtggtattatctgaacgctgatggcacaatgaaaacaggatggttattagacagcggcagatggtattacctgtatgaagacgggaatacagatcgcgctccagtaggctctatgaaaacaggatggttattgaacggcaaccgatggtattatctgaatgaagaggggaacactgacggtgcgcctgtgggatctatgaaaacaagctggctgctgtggaaaggcaaatggtactatctgaatcctgaggggaatgcggacggggcccctgtgggttccatgaaaacggggtggctgtcttactatgggaattggtactatttattgtcaaatggtgaaatggtaactggaaccgttaccattgatggaaagcggtacacttttaattcagatggaaaattaatttcttaaagcagagcaatacgagtaaaagattgggctgatatggttaaaactatatcagcccgatttttgcgtttatttcccaaaagagtatttgccaaacgctgtaccagatatcccgatagagttgatattgttccgataattaggtatactcggtggtaaagcgaagtgcagattttaaccttattcacattcaggcagagtctgaaacagtaaatggtttagaatattatgataatggaggaacaagtatggcggttacaagagatacaattgttaaaatacaattatcagaatcagatatgcatatttgtacagagaatgcacaaattctttgtgagactatgatagaccgcagggatttacatgcaaggggatatatggagagatttatagatatcctgatgggagaagcagcggaagcggctgtcattaaatggctgctgcagaatgggaaatatgcggtctcagcggtaaataaaagatccggaaatcctgatttgggtcacgacattatcttaaaagatatacggggaaaagacataaaatgttcggtaaaatcttccttgtcggtgtataaaagcacaattgatgatatattagatacttttacggtggcaaccaaggcgagcgaactgcggaaggtaaatattcaggtatattattggctgaagctgaaaggagaacctagaattactgtaccgacagaaaggaatatggcaataataggctggattggggagaatgatgtgaaggaatttggtacatacagcacagagaatcgccaggtaccaaagatgaaactaagggatacacggccaatgcatagtctgctggagtacctggtttagcgctgtgagagaaggagcagagattgaagatgaaaacaaaacaagttgacagaaatatgaatcattttcagaatgataacctaaataaattggcgcaaatctttccttccgctgtcaaagatggtgaagtagactttcatgcattaaaagaagagctgggtttttttacggaggttaaagaagaaaagtacgaatttacttgggcgggtaagcagaacgctaaaaaagcggcacaagaggatgttttaggaaagacattaaaactggttttgcctgaaagtaaagaggcggataaaaccgagaatatttatattgaaggcgataatttggaagctttaaagctgttacgccagaactattacaatgcagtaaagatgatttatattgatcccccttataatacgggaaatgactttatttataatgataattataagatgtcggaagcagacagcctgaaagcagaaggcgatatgagtgaactgggtgagagatatacagtaaataagaaatctaataacaggtatcatgcaaattggctgaacatgatgtatccgcggctgctggtggcaaaagatttattgacagatgacggagccatttttatcagcatagatgataatgagctggaaaacgtaaaaaatctctgcaatatggtttttggcgagaataattatgttgcaatatttccatggagaaagagaaccgctaaatcagacgtgccatttggaatatctcaggattatgagtggattgtatgctatgcaaagtcatcattgttcaaaggtagcatagcaggaaaagaaagaaaatattatgtgagcgatgattatccagatcggccatggagaatacacgatttgacaaagcagacaaccgcaagtgagagaccgaacagctacttcacaatgatcaatcctaagacaggtgtggaataccctgccaatcccaacagaacatgggcaattactcaggatacctttaaaaaatattatgaggagggcagaattgtcttccctggggattattcttttttaaatattagcaagccggcgcttagatattggaaagaagatgatatggagaaggccggggaggactttggacggattgcagtgagtacaaaactcggagatgatatcggaatgtcccaggatggaacaaaagaaataacgaacctgtttggaagcaaaatttttccatttcccaagccctcatctttaatttgctttttgtgtaagatacacaccagtgaacatgatattatacttgactttttttcgggctcggctacaacagcacatgcggtcatgaagctgaacagcgaagataagggcaaaagaaggtttatcatggtacagattcctgagacactagaggcgtcaagtgaggcatataaggcaggatttacttctatatgtgaaattggcaaggagcgtatccggcgtgctggcgagagcattgtgagagagaatccggactgtgaagtggatacgggatttaaggtattccgtatcgcgcccaccaatataaaatggaactcacttatggatgcagggcagcttgatttttcgcagatcgaaagtgctccggatcttgcggactttatgcccggagcgaatgacgcagatattgtgtacgaattaatgctcagacagcgcaatgtagctttatccgagtctctggaacagctgtctgacattggaagacgcacatatctctatgggggcagctatctggtatgtctggaaacagagataaccgtagaattgataaataaactggcagagcttgtaccgctgccgatcaagtatattttcagggattctgcgttcagagacgatattgcattaaaagatgagacatttcgaagattgaaggcacttatctcgaagaatgccggaacagataaacctgtatatactgtagaatttatttaaggggaaatgaatcatggcaggacgaataacattccagttcgacgataaccttgattatcagctgcaggcggtgaactctgccgtaaggctttttcaaggattacccagacgagtggatagcatctatggatcagaccgtattcgtaagattggtgaaggagatcccataaaaaatcacgacattgtagcgggttccagactattggagaatttaagaagtgtacagctgcagaataatctgtttgcagattctgccttggcagcgggaaacaactttacaatagaaatggagacgggcacaggcaaaacctatgtgtatcttcgtactatactggagttatatagggaatatggttttaaaaagtttatggtagtagtaccctccattgcaatccgtaaaggagttgaaaagtcaatggaacagctgcaggaccattttaaaaggctatataatgtggatatattaaggcacagctttgtctatgacagcagcaatccaaggcaggtcagcgcaaagctggtggagagcagtgatttaagcatttgtgtgttgaacattcaggcatttaataaggataccaacaagattagaacggaagatgagtatgggcagattctatgggaagatatcaaatatattaagccgattattattatcgacgagccacagaaactggagggtacaaagaggaataaatccaagtctctgaaagctatagaggaactgcagccattatttactttaagatattctgcaacacacaaacagctgtataaccaaatctacaagctggactcctatgccgcatatcagaaggagctggtaaagaaaatcgcagtaaaaactgtacatggggtgattcctaaagattatccatacatccgatatgtatcctttacctctgatttgaaggcaagaatagagatattctcacaggagcagggcggcacaatcagatttaggagctgtaatgcccggggaggtacttctattgaagaattgtcaggcggtcttttgcagtacaaagacatgcgtgttgccggggaaccccacaaacttaagcccctggtaatagcaacgaaagagaaaacgattgtattggaacagggacacagtacctatgaaactgaaaaaaatgaagctgtgcgtattcagataaggcttgcgattcagaaccattttgaaaaacagataacaattttaaataccggaagaaaaattaaggcactgacgctgttctttattgattctgtccataatgtcagggacaatgcagcgcccgacggcaggggcgagtacttaaggatttttgacgaagagtacaagcggtatgtctctaagaatagagctgtgattgaaaagtatcaagaatttttcccgggttatacgaatgtacagtcggtcagagaaggctactttgctctggatgtcaaaaaaaatgcggtcgaaatagagggatgggattccgcggctgacgaggatactatgaatatcagggcaaagtcccgggaagatatcgatcgcggcatcagtctgattctggagaaaaaggatgagttaatatcctttgaggagcctcttgcattcattttctctcattcggctcttcgtgagggctgggacaatccgaatgtatttaccttgtgtacattaaagtccgggagttctgagatagcgaaaaagcaggaaattggcagaggcttaaggctgcctgtagatatcaccggcaaccgctgccttgatggcagaatcaatgagcttacagttatagcaaacgactactatgatcactttgccgcagcattacaaaaagatttcaatgatactatgaattataataagaatgaagttaccgccgagattttgatttctgcattgaaaaccgccggggtaccacaggggaaaatcactccggaattggcagacacattgagacaggaacttatttctgccggtgtgatgaatcgggacaacatgttacagggtacaacagatcaagttacgaaactaattgatacgatgacctttgcagaggacactctctgtgagcacatggagaagattaagaagcagtttaaggaactgatggtgcagagaggcacaaaaaagattgagatccgcaacggagataatgagccttgggaaaataaggtaagatcctttgtcacacagggtgtgtttaaaaagatttactttgccctcagggaaaatctcatgaagcggacgatatacaaattcaggattgataaagataaatttattaaagattgtgcatctgagattaatcattacctcaggttaatgaaagcaaagaatgtgtttaaaatagaggctggtatggcagcatttaatgaatctgcaaggtttgttatggaagaggtgtcctgtggggagaaggaactggaaagggaagctgctttcgggacaaagagtgactttgagattgttacatacatcatgtatcatacgatgcttccaagacttgccatattcaaaattattcaggctgttgaaaaaagagacctattgaacaatcaggatatcctggacacaattacgcagttgatactaaaacggctgaaccatacgaaagcggcgaaccttacttcctatgaagtgataaaggggtatgaactggatagtaagaatatctttgaacttgataccatcagcgaagaggattttcaggaggaatggagtgtttttcaggcaaatgccactcatagtgcggcaatgaacgagtattacaaaatggacagcaaaggagagaaggagtttgcggaaaagctggaaaataatcagaatgtattgctgtttacaaagctgaaaaagggaggctttgttattgatactccttatggcaattataccccagactgggctattgtgtgcaagaaaaacagtctgtatgatccggatttggggatttacttcatcgttgaaaccaaggcaggcaagcaggatatcaatttacaggaggtggagcgagagaagattcagtgcggcaaactgcattttcaggcagtaagtgatcagatacgatttgactgggtgaacagttatgaggacttcagagataaatttggggttgcagagagtgaataatcagaaattaccgcgtatcgcaatgggagcatggcttaaatctttgggataccgccgttgtttatgtaatgagcgcttcggaggaaatacttggattgtaccaggattcacagtgccattgtttgaggggcatagcgacatgggggtaacgctgaatacctatacttatcttggacatgggaatatacagaatgaactggtgagggtggagaaatcggagaatgccagaaaagaactggagaagaccaaagggggaaaacctgtttcccagaaaatgttccgggcaatatgataggaaagaacagaaaggcgctctgcttcggcagggtattttctgcattccctactccacatatcctgcgagataaggtaaaagaaccgatgaaggcaggatatctgccgattgatattaaatttacagataggattgcgtaatagaacttcgtcagctaactaattatagaaaaataatggtgtgaatatatgaaaaaatccgatcatgcaggagaattgtgctccaacatgaccgggtttttaattttgctttatttgatatgctccttaatctcttatatccgattcatcaagaatgattttctgcttttcgtcaatttcaaaggcaagtgtgcagtcgaggaaagtggatatttttattaaatcttctgctgaaaaactgctgcggctaaatttattgcttagagattgtttgcccatgccaagatattctgccaactcattcattttcttacctttgatttttaacagtgcttttattttatctgatatgcccatgtatacccccacctttctatgaataacatacagtaaataagttagaaagtcaatcaaaaagaaatattacttaatcaaaaacatgtattatggcattgacaaaataatcacaaaacgagaactacaatgaatcttgcgtactgtttgcagatgatggggaaaaaggttctgactgtggattttgacagtcaggcaaacctgactacctgttttggggttgaggatacaggggagttggagactaccattgggcatctgatgatggcggagatggaggatgcaaagcgtcctgccgtgaagcggtacataaagacaaaggatggggcggactttatcccgtcttccatttacctgtcggtggtagatgcgaaactgaggctggaaatgggaacagagaagatattgtctgggattttggagccaccacgtgagaagtatgactacattttgattgatacctgtccgtccctggggacactgaccatcaatgcactggcggcggctgacgaagtaatcatcacagtgaacccgcagtttttggcaatgatggggatgcaggactttctccggaccgtgggaaaaatccggaaaagtatcaacccgaaactggggattgcgggcatcctgctgaccatgtgcgagacaaggacgaagctgtgcagggtgttgacagaggaagtggaggagaactttaaggagcagatacgggtgtttgaaacgaaaaaccccaatacggtgaaagttggtgagagcatatactataaccttccggtggtgcagtacagtccgaaggaaagcgcaggggcggcttaccggagatttgcaaaggagttgatttcgtatgaaggctaacggggcaaagcggaagatttttaatgatgcggtggatttgctgaatggggcaggggatatgcctgccccggagggtgggatacagatgctgtcggggaagagtgtgggatgaccgggaggaatattgcaaggtatatccatgacccggagatttccgggaaagatgcctgtgttattttccataagcacagggcatctcatccgtaccatcagcatgggaaagcaaggaatctacgtcaggcgctaaagaagattaaaggacatgacgagtttcagatgaacgggagaaaatagtgtttccatgattgggcatgtggagtcaatggcagaactggagtggagatatcaattttatgtacgtttgggaaaccggacattataaatgatttgttaacatctatataatctttctaaccgtttcaacaaatttcagtacatcttttggcgcatccaggctgtacagcaggccataggggatgctgtaatcccaatccacgggaattgacaccagactgggatggacctcctgccagcattccagggtgaggaggacatttccggtctcggcacagcggttgaaaaccgataagtcataaaacagcggtgtatcctctatatgaatttggggatggtgcttttccaggtcattacggaggaaatcattgacgccggaatctccctgtcgtaccatcattagcgtttccccatataaatcttcaaccacaatagattttttcccagaaaggcggtgttccctggacactgcaatcattttcttatatctgccaagggaaaggaaattgcagcggcggagccattctctggaatcgcatactccaatcagaaaatcaaatttctttcccaactgttcaatctctgccaggatcccctcatggttatcctcaaagggtacaaggtgcagtttatattcggaaaaatcctggttcacacggtaccataagtccatgaaaggcttcgcgggattcagcagtgaggtaccgatgcagaaggttgtgtcattcaggtgcatggcagccctggcgcctgcaatggattttccggaataatcgatgataaatttggcgtcctgatagatgagggtaccggccgctgtcaggcggacaccagaggtagtgcgcttgatcagtttcaaatccagatggctttctaacgcattcatctgtttcatgacagccgtgggggaaatgtacaggcgttcagaagccttcgtaaagctgccgcagtcggcaacggcgataaatgtgttcagcatttgattgtacatgcagcacctccgatataaactaaaagttaatactatgataacattttggagattccggttcaaggagaatttcggtagactgtaagaaaaaaggaagaggtgtttgagatggcagagttaatcgcatttttttcacgcagggatgagaattatgtgaacggaatgctgaaaaagctggatattggaaatacggaagcagctgcccgtatcattcaggagttgacaggaggggagctgttccaaattgagcagatgcaggcgtattccaaagattataacgagtgtatcgcccaggcacgggcagaccagaaacgggacgcccgcccggagctgaaaacctggccggtaagtttagggccttatgacgtggtgtaccttgggtatcccaattactggggaaccatgcccatggcagtctttactttcctggagcactttgatttcagcggaaaaaccatccggcccttctgcacccatgaggggagtggaatggggggaagcataagtgatatcagaaaactgtgccccggcgcaagggtggagacggggctttctatccggggaggaagtgccggcaggtcgaagaaggatattgagaaatggatagggaaggaaaggtgaaaatatgaaggcagatagaatgagtgtattccaggcgggaaaacctaatgaggcttttaaagagtattttgtgggacagagttacctgaacatgctctccactgagcaggtagtgattggaaatgtgacctttgaaccgggatgccgcaataattggcatatacaccatgctacgtccggcggcggacagcttctgctggtgactgccgggcggggatattaccaggaatgggggaacgaagcccgagaactgcacccccaggatgtggtacacattccggcgggggtaaagcactggcacggagcggccccggactcctggttccagcatctggctgtagaggttcctggggataattgcaggaatgagtggtgtgaggctgtttctgacgaggcatatagaaaattgaaatagagtaaatggttttgaggaaagaatggaagggatagatatcgtggagaaagtaacagcagggaaagaacaattgggagcctttgcccctaagtttgcagaattaaatgatgaggtactgtttgggcaggtgtggtcgagagaagaacaattgtcagcgagggaccgctgtatcgtcacggttactgcactgatggccagcgggattttggacagttccttaaagtttcatctggccaatgcgaagaagaatggcgttacaaaggaagaaatcgcagagattcttacccatgccgctttttatgcgggctggccgaaagcatgggcggcatttcatatggcaaaggaagtatgggaataaatgcagatgataagcgatagttttaggaagaaaggatgaaaaaatggaatatacaaaattaggaaattctgatattcaggtatcccgcctgtgcgttggctgtatgagctttggcgatcctgccagtaagatgcacgcatggacgctggatccgcaggagagcggggaaatcgtcaaacatgcgctggggctggggattaattttttcgatactgccaatacctattcggcaggaaccagtgagaaataccttggcagggcgattaaggataatatagggagagatagggtggtccttgcaacaaaggtttattttaatgagggtaaactttctaaggaagccattccgcgggaggtggaaggttctctcaggcgtctcggcacggattatattgacctgctgatcatccaccgcttcgattatgatacaccggttgaagagacattggaggcgctgcatgaggtcgtacagtcagggaaagtccgcgccatcggcgcttctgccatgtatggataccagtttatgaaaatgcagtatgcagcggaaaagaatggatggacgaaatttgtttccatgcagaaccattataatctgctttacagggaggacgagcgggaactgatccccatctgcaatgagctgaacgtggcaaggacgccgtacagcccattggctgcgggaaggctgtcccggcccggctggtctgcggatactttgagaagcaggacggatgtggttgccatgggaaaatatgataaaacacagaaaagtgatatggagattgtaagacgggtagcagagcttgccgggaaaaagggcgctacgatgacgcagattgccctggcctggcagtttgccaaaggcgttgcagcgccgattgtgggcgccacaaaggcaaagtaccttgatgatgcggccggcagttttgatgtcacattgacacaggcggaaatcgaatatctggaagaggaatatgtgccccacaatatcgtgggtgcattataggaatggaggctgtcagaatgaaacatatattgataatctcggcaagcccgagaaaaaacggcaactcggagatactctgtgaccgctttgccaatggagctttagagagtggatgcaaggtggaaaaggtattccttgcctcaaaaaatatcgggtactgccgtggctgcggtgtctgtaattcgacacgtcaatgtgtgcagcgggatgatatggaagaaatacttgctaaaatggtaagcgcggatgtgatcgtcctggcaacgcctgtctatttttattctatggacgggcagatgaaaactttcatagacaggactgtgcccaggtatacagaaataaggaataaagatttttattttattatgacggcggcagacacggagaaagaaaaccttgaacgcacaatggaagcgttccggggctttaccgaagactgtcttgacggagccagggaggcgggcatcatctatggaaccagggcatggcaggccggtgagataagagccacggacgcttatgatgaggcatatgaaatgggaaaaagtgtaggattattgaactgctaatgtgcaatcagctatcgatataggagggtttaatagcatggaaaagaaaaacgtaatgcttctggcaggtgctggacagattggcatggcgattgccaggcgcatgggatatgggatgaaaattattgtcggagatattcagcttaaaaatgcgcaggaaacagcccggattatgaataatgcaggctatgatgtggttccggtggaaatggatttgtcctcacgggagtcaatcctttccatgatatccgaagggcagaaatacggagatattaaaatgctggttaatgctgcgggagtatcgccaagccaggcgccggttgaaaccattttaaaggtggacttatatggcacggctgtattgcttgaggaggttgggaaagtgatcagtgaaggaggagctggcgtgacgatttccagccagtctggttttcgtatgcccgcattaactgcaaaggaagatgagcttcttgcctgtacccccacggaagggcttctggaactttccttattacagccggataacatcagggatacactccacgcctatcagctggcaaagcgctgtaatgaaaaaagggtaatggcgcagtccgtggtgtggggaaaacggggtgcaaggctgaatgcgattgccccgggcattattgtgactcctctggcagtggatgagttccatgggccaagaggagatttttataaaaatatgtttgcacaatgtgctgccggccgtccaggcactgcggatgaggttgccggtgtggcggaacttcttatggacggcaggggtgcctttatttcaggtgctacgtttttgattgatggcggcgccactgcatcttactactatggggaaaagtaaatcattttttaacatggatgaggttactgatatatggacgtttgccggatagtacatcgtcataaaaagactgcttccagtcaataaaggaaatgcattcattcagctctgtgatagaagccaggagagcttcccgtttgcggaaaagaatctcctgccttgcaggaattgtggattctccctgaaggcataaatccagatagattttcatctcctggatgctcatgccgcattttttcaagcaggtaaggtccttgatccactttatatcccgctcatcaaatatgcggcggttatttttatcacgctttacattggggacaagcccttcattgcagtagtatttgagtgtctggtacgtcatacttgtttcctggcagacctgcatcatagtatacatatggagttcctcctgataaaaatgtgaaagttttgtgaatcgcttgaccggtagtaacaatcggttgttacaattttattgtaagccaggttattagaaaaatcaataaggagtgagtgcaaatgaaagtattaatgattaacggaagtcctcaaagtagcgggaacactgcgattgcgttaagagagatggagaaaatttttacagaagagggtatccggacagagacaatccatgttggaaataaggatatcagaggctgtattgcctgccgttcctgcttggagaaaggcaaatgcgtatttgatgacctggtaaatgaagcagcgcctaagttcgaggaatgtgacggcttggtaataggcagtccggtatattatgcatctgcaaatgcgactttggttgcttttctaacaaggctgttttacagtacaaattttgacaaaaccatgaaagtaggagctgccttagcagtggctaggcggggaggatgttccgcaacatttgatgaactgaataaatttttcacaatagcgggtatgccggtggcttccagccaatattggaacagcattcatggaagagagcctggggaggcagcgcaggatggggaaggactgcagattatgaggactctggcaagaaatatgacatttttgatgaagagcatcgccctggggaaagaagcatacggtcttccaaagatagaagcatttagtccgacaaatttcatccggtagggaaggcggcgtcggaacatgcaggaatggcagcggacagaaggggagctgtcaaaaaaactgtaaactaagaagggagcatttagaatgaaagcaaaaaaaataggagcgatcctgttaacagcagtaactgcggtgagcctgcttgccgggtgtggtgcggctgcagaggataatcagacggaaacggcagagcagacaacacaggttgaagcaagagagccggaagatacgccggacgattctgaaacggaaaattccggcagtgcggaagaaattgccagaacagaaacagcaggaacgggcggcaatacactggtcgtatatttttccgcaacaggaaatacagaagctgttgcggatgtgattgccggagcagtaggcggggactcttttgaactgaaaccggtgcagccttacagtgacgatgacctggattggacagacgataacagccgtgtaaccagagagcatgaaaatgagaatgaaagaaatgtggaacttacggcagagacggtagataactgggattcttacggcaccgtatttatcgggtatcccatctggtggggcattgcggcatggccggtggttggatttgtagaagcaaatgattttacaggaaagaccgtgattccgtttgccacttcctcctcgtccggtatgggagaaagcggggaactgttagcagagctggcaggcacgggagaatggcaggaaggccagcggttccgctccggagtgtcagaagaggatgtgcagacgtgggtggaagaattagggctttcccagtagtagattttcgtatcctattatgtttagcagtttctgaaatatcatcaatatgggtaaatgtgaaacttggaatataggtccgcagcagatattttgagacaggagaaactgcacaggaaaattacgatgaagctaagtagcaggctatgaaatggctggaggaacaggaggaaactatgatggaatatgtaacattaagtaatggcgttcagatgccaattttaggttatggcgtttaccaggtgacgaaggatgagtgccaacggtgtgtacttgacgcattaaaggcaggataccgttcccttgatacggcgcaatcttattataatgaagaagaggttggctccgcagtcaggaaatccggtatatcgagaaaggagatttttctgacttcaaaggtatggattgagcattatggctatgaagaatgcagaaagtctgtggaagagtccatggaaaaactacagacggattatattgacctgatgttgctgcaccagccgttttctgattattatggtgcatggagggctttggaggaactatatgaggcggggaagctgcgtgcaatcggaatttctaatttttatccggacagattgatagaccttgcatcttttgcccgtatccgcccaatggtgaaccaggtggaaacgcatccttataaccaacaggttcttgcaaaggagtatatggataaatatggtgtacagatagaagcatgggcgccttttggagaggggagaggcggtttatttgaagatcccgctcttctggaaattggtgcgaaataccaaaagactgcggcgcaggtaatgcttcggtggcatattgaacgtggggtggccgttatccccaagtctacgcattatgagcgtatggtggaaaatttcaatgtgtttgatttttcgttaagtgcggaagatatggagaaaatggcgggccttgataaaaaagaaagttcatttttctcccattatgacccggcgatggtcgagtggttcgttcagattgtagaagaacgtaaaacgaatcatgacagcaggaaagagcataaaaattggtaaatgtaataaatttgaccagagaaaagtatggatgaaagcttcgtgaacgaaaaaaggaacagttagatatggatgtctgattgtttctttttttgtacaaaaatttaggaatattttatgaaaatttggcacataaaacattcctgtcagcagatactatgggtatatatgaaagttcatggaattctgtttccagaatttgacgggcataaagagcacaggttacatcattgttggacagcttgcgttcaaaatggatgaggtggtattgaagacggattatgaaggactggaggattttgagtgggtgtatctgtcgaaggcatttgcagataccgttattccggagggaatcctggagaaagccaatgtctcctatggcgggaccggatttttctacgataaagcaccgaagctgccggaggaagtggagcatcatatgccggattaccatctttatgacgaatgggtggaggatatcttcgggcttctggaacggattgagatcctgatgaagtacaagtgccttccccatgtgatgcggtttgaaagatataaggaaagccccttccgtggtatgtacatctccattgcgagatgggcaaatcagccccgttaagaacctgctttcagttaatggaggcttcgattttgccgccgttctctcagaaatggacgaagcagggtatgacgtgcgctggcaggtgctcaactccaaagattttggagtcccccagaaccgggagaggatattccttatcgcagttcttagaagcagaggcagacgggaaatattacctgtcaccggagaagacggaggaactcttaaagaggttataggagggatgcagggctatcgggtgtataacccgtccggcatttctgccagtattagtgcgaatggaggcggcataggggcaaagaccgggcttttctgtatggggaatgtgaaccccagccgcaaagggatgaatggaaatgtgtatgatgacagagggattgccccagctgtcacgacaaacaaagggcaggggaataaggtgtttgtggagcagatactgaaccacccgcagattacggagactgccagatgccttgtagtaagttacagcggtggatttatcagccagagggcaagcaattccggcgtgcttgaggcacaggcagtgctgacaccggaacggatagagaagcggcagaacggcaggcgtggcatatgcggtggcaatgtccctgccggagagccgggaggatgaaacagatggatcggggaaatagaaagacagaaaagagctgactgacagccgaaaagaaatttgatttttaacaggaagtataggttctgcagggaggaggtgaaggcggtggcacagagagggaggaaaccgaagcccatggcagtgaaggtgctggaggggaatctggggaaaagatgtctgagtggcagtgaaccgaagccgcagaagaaagcgccgcgctgcccttcctgtctggaggatgaggcgaagaaggaatggaagcggatagtgtttgacgaggcaaaggcgcagcggacagtagatttcaccagctgcttaaagcataccaaagggcggtggagagggcagaattttgaactgctcccctggcaggacagcattatccgggatgtgttcggcactgtgaaggagaacgggcaccggcagtataatacggcttatgtagagatcccaaagaagaatgggaagtccgagctggcggcaggagtggctcttaatatgacctgtggggacggggaatgggagcggaggtttacggctgtgcttccgaccggcattcggtgtgctttgagcagcaccagaaagcggaggatatcatccttgggaggaagattgaccacactttctatccggtgatttatggagcttctgatgatgcggactgatccggcggggaatatcaagccggataaggagaaatctacagagaagattgacggggcggtggctgcggtgatggcgcttgaccgggcaattcggaatgaagggaatcatggcggcagtgtatatgatgagagagggattttggtgttttaagatgagggaattcatgctatactgggagcagaaaattagaggttatggaggtaaatgatatgagcttgaggaatcaatatcccatatgtgaatttgataccagtaaaaatccaatcattcatccagcgaattttttgacgaaaagtcttccagaaaaatgtgtgattacctatttgaggaaggaattggagcgatttgtagaagaacacaagcttccgatcattggttaccttaactccgaggtgtttgatataccgatttatgaatatgtagatggtgcagacaggctttgtattacaatggcattttgcggtgggcctggtgcagcagtggcgcttgaagaattacatgccatggggtgtgaaacgttcatcgtttgcggtggagcaggggcgttaatcaatgacagcaaggtgggtgagatcgttgtcccggtctctgcggttcgggatgagggaacctcttatcattacttagaaccctcccgtgaaattgaatgtcataaagagaccgttgagaaggttgtttcatgcttaaaagaaataggaattccatttaaaaccggaaagacatggacaagcgatgccatataccgtgaaactccggatatgattgaacgcagacgaaacgaagggtgtatcacggtggaaatggaagcagcggctttttttgcggtgtctcgctattataatattccacttgcgcagttattgtatgcaggcgatgatgtaagtggtgagcagtgggattcccgaaactggaatacccaaaagaatatacgatatgaattgcttcgtaccgcgattgaaattgtaaaaaaattgtgatggagcatttgcttattggtgaaagaccgggattatatattcccttttaaggctgttagcattgaaacattattgtaaaatacataaatttgaattttagaattacggaggataatgcaaaatgggaaaatcaatgtatatgatgatgattgagaagagcaagacctataataaaatcaccaaaaaagtggttgaagaacatgttgcgaacataagaaaattagatgatgagggtaagctggaaatctgtggtgtgtttaagggatatccaggaatagccggcatgtatatcttgaaggtggaaagccgggaggaagcaaaagaactttgtgatagtgaaccattggttgctggcgggtatgcaacatacaaactgattgactttcttattgcaaatcgtgaaaacaattatttgcttcaatagaatttcacatgattattgtggttcaggtatgagaaaaatcatttataataattttgcattcgtggaggtggaaatggaattttcaaaagacgagttagtggaagcacaaagacagattgattcaacgctgcacaaattaagggaaacgataaagacttttgagtcaaaagaaaatgtggagcggtataaatcacagattaccctggccaagagacgggtaaaggcttttgaaattgcagattatttcataagcaatgagattgggagaaacaactaattctcagttgatcaggaagtgaaatttataaagttattttataaaggcatctcctctgaggtgaccccttaaagtctaacttttgggggtatttgctaagtttaaaaataaataaatcccaatacgctatattagatgaaaaataagacggtagtaacacacccccattcttactacgtttttactacgattgacggccttaatttgccacattttgccccgttttgcttattctgtgattgttttaacaatctcagtggcaattacatacccggcaaatcgcggcaaaacagggcaaactaacgcaaattaggaggactttaaaatatgatacgagtgcttttcgtctgtcacggcaatatctgccgttcccccatggccgaattcatcttaaaagatatggttaagaaaggaggtatcagcggcgatttcatcattgcttcctgtgccaccagccgggaagaaataggcaatccggtgcatcacggggccagaaagaagctgaaggaacatggcatatttgttgatggaaaacgggcagttcagcttacaaaagaagattataacaagtatgattatctgttagccatggacagcaggaacatatcgaatatgatgcggatactgggcaaagatcccgggaagaagatataccgccttctggactttacagcacgtccgggagatattgcagatccctggtacaccgggaattttgatgaaacctacagggatatccgtgaaggctgcgaaggatttctgaaacaggtactctctatacacggcaacatgcctgggggtgcgaataaaatgcagtaagctgcgtacctatgatttgcaatagccagataatagtggtaaaatatgggtaatcaaattaggaaagaagggtgttaattatgggcagagaggtagtagattacgtagttgagaaaacacgtgaattaatgaatgcagccacatgcagcagcgaggcaaaggaagcagcacaggcctggctggatgctgttggaactgacagggaagccgctgagacaaagaaatacatagaagagctggaagcggatattatgccgattgacaatttaatcggctttgcggaatctgaggctggagctcaggtttttggggctgatacagcaaaaaatgttgctgcgcatgctaaggagattaaggctgcgggagcaaaatactgtgactgtcccgcctgcgccgcagtagaagcgattctggaaaagaaggacagtcttttgaagcagtaaaagaagctgccccttgagatacggggctgggcatcagtcagaaatgattggtgccctttcttttactcctgttttctcggttccggaatccccatttccgtatattttgcagatgacagatgccatggattctgcagtatcctctgtacttctaaggatccaggctatgtaaaggttaaacagagagccggcaaaggcatgtagagtataatataaggccgtatcttctctgtcttcccaataagtccccagcacatagtcagttaaagcctgcagaaggagatttcccatgccgctttttaacaggcacttgataaaatctttgtgtttataaaagtattggaagcagtggagcatattattatagctgttataatttcctttgtcttcccaggaagccacatcctttcggtaggagtctataatatcatccagataggtaataaaaatctcatcttttgagcggtagtttctgtaatatgtcatccgggagactcccgcttttttggcgagttctgtgaccgatacagacgataatggtttttcttctaaaagcagcatgagagcagataccatgcattccctggcaaagagattagatgcattcttttctccgcttttcataaacaaaaccctcctttttgtaacagttaatccgccatatcttgcctgcggtccaaaggtaatgttacaatatgtaacacataaatagtataacagagaaatgggagattgcaagatgaacaggttggcaaaagcaataagatgcgttactctggcgccagtgatggccgggattatgctgacgcttgtatatgttagacagcctcaggttatgggaagggcgggcagcttctggtggggactcttttttctgacggtacttcctatcctggcatatcctctgcagccgtacatccccggctatagaaaaaaagggagagaagggcagagaagcctggctatggtatttgcagtagcaggctatcttatgggcgggattgcaaatttcgttctgaaggcgcccagaggaatgtggatgatttatctggagtaccttctgtccggccttttaattttacttttcaacaaatgtctggggctgcgggccagcggccatgcctgcggagttgcaggacccgcagcactgctggtatattttagaattcctgcgtttatttccggtatgataattctcgcgcttacctggtgggccagcctgagaatgaagagacatacagctggccagctgctggggggaacggtaatcccggtagctgtcatcctggtgttaacttttctggagaaaataactctgtaatacagggttcctttatgatagaataatggtatccaaagtacaggaggttagtttaatgagatatagaatcgtaggaagcatcatgccggcggtggagatgcagctgcaggccggagaatctatctatacccaaaccgggggaatgtcctggatgagcgacgggatccttatgaataccaatgccagagggggatttatgaaagggctgggacggatgtttaccggtgaatccttttttatgacaacgtatacttctcagagagagaatgctgagatcgcattttcttctacggtgcccggggagattctccctttagatctgcggaagtatggaagtatgatatgtcagaagggggcattcctttgtgcccaggagcaggtgactgcagatgcagtatttacaaaaaagttgtcttccggacttttcggaggagagggctttatacttcaggagctgaggggaaatggtatggcatttctggaaatcgacgggaataaggtagaaaaggatctggatcccggagaggtgattaaagtagacacgggaaatgtagtagcctttgaaaccagtgtgagttatgatatagagatggttaagggaggtatgaacatgtttctgggaggtgaaggcttgtttatgacaaaactgacaggtccgggacatgtcattctgcagacgcagaatttttcagagtttgtggggagaatcaagcagtacatacctacaagaaatgattagataacagagagtatcggtactctgacatacagattttccgtatattcttgcggagccataaaaatgcacggagttttatctccgtgcatttttgtgggaacagtatgaaaaatatactaaaaatccagtccctccaatccctcttcttttataatattcttataatagtgaagttcatctccaataatctcgtcaatcacccgcatgcctaagacttccacaggagccttatcatccgtaagaatcaaagaaccctggcggacgggttgtagggattcttctaccttctccatcatttgcctcagagcgggcgtcccaatggcagaaagctcctcagaaaatacagtcagcatgtccccgttttcagatgcaaacagctccatatttgtgccggaccctaccttggcagtataggcatagggaaatactgaggcaatggtatcacagagataatcattgatggatccctctttactggaatgcatattcatatttacgaccattactccgtcttccttcaaatgctcctttaccatagtaaaaaactcaactgtagacatctgaaagggaatggtgatgtcctgataggcatctaccataatgacatcgtatttatcagagtttgagagaaagattcgcccgtcttccacatgcacatttacagacttcggaaggtcaaagtactgactggacagacgggctattttttcgtctatttctaccccgtctatgtttggggagtccagataagaagcgcacattgaggcaaatgtgcctgtacccagaccaagaataagaatatcgctgccggcctgctgtccggcgccggccatataaggtgccgccagggcatagtcataatacatgcccgtaaattctttgtgcttcattttaatggactgtacccctgccagtacattagtggaaaggattacgctctcatcgttttcttttacctgcagatagttgtaaatggattctccctcatatacaagatcgttttcccagaaagcaaagctgtactttacagaggatatgctgaagagaccaatcagcagaaaggaaacggcacaggcggccgcctttttccggacagatataaaatacagaaggctcagcagtgccagcaggacagagaaaatgataaatgttgccgcagtccccaccgttggaatggttacaaaggtgggcaggaaagtaccaaggatgcttccgatggtattcagtgcgccaagtctgcccacgatttctccgttgttgtctaagtcctccacggtatatttaacaagggaaggggtcaccgttcccaggagcatcagcggaaagacgaagataatcagacagctgagaaaggatgcgattaccaaaaagtttttttccgtaagcaaagctactcccagggaaattgctgcaatcaggtatttgcctaaaaaaggaatggcggcaatccatacggcggcaagaagaaggcgtttgtacaggcgcgcagggtccgggttcttgtcagcaacccttcctccccagatatttcccagagccatagcaatcatgattgtgcctatgataatcgtccagattacctgagaagaactgaaataaggggcaagaaggcggcttgcccccaattctacagccattaccgacataccggagaagaattcggtggcatagagaaagtacttattctttaatagattaataggtgtcatattcttcctttctttcagcaaacagctgatgtagtatttaatggtattatacaggagcgcgaaatatggtgcaaggagggatggagttttgaggacatgttttttagaatacaacttgtcaacacatccatacaagttatataatatgtcttgtaagaaatgccatttgaataacaatacctttacaagtgagcttgtagaagttgcacatttaacattgagatgattttaccatctgcctggataaaatcagcacattctaccaccattgtaacgatacgtttcgattcacttactacaagcttacttgcaaggatattggccataggggtaatggagggtttgatatggcaggagaaagcggtaaaacaaagtattatttgttaatggaacagctgaaggatgacattttgtccggcagagtaaagcccggagaaaagctgccttctgagaatgaattgtcgtccacataccagatcagcaggcatacagtgcggaaagccctggcgattctggagaatgagggatttgtggttgcagagcatgggcggggtaccttttgctctgagaggatgcgccacagaaagaattccagaaatattgcagtaattacgacgtacatatcggactatatctttccccgtctgattcaggggattgatcgggtgcttacctccaacgggtacagcattattctgaaaaatacaggcaacagcagaacgaatgaggccagggcgctggaggatattctgaccaaggacatcgacggactgatcatagagcccagtaagagtcagattctgtgcaataatatgaacttgtatgcaatgctggatgaatatgagattccttatattttcatccagggaacttatgcccagatgaagcataagcctcatattcttatggatgacagtcaggggggctatcttctcacaaagcatcttctggataccgggcgggaaaaaattgccggagtattcaaggcagatgacagccagggcagagaacgccacaaggggtatgtaagagctctccaggaggctggaaagttgtatgatccggatatggttgtatggttccatacggaggaccggaagaaaaaaccggcgcttgccattcgtcagatgatggaatacggcatggatatggattctgttgtatgctacaacgatcagattgccctagaggtgatgaaaaccctgcagaaatgcggcagaagaataccggaagatatcgcagtggccgggtatgacaattccctgattgctgaaaatgggattgtaccgctaaccaccatcgcccacccgcaggaaaagctgggagagatggcggcggagctgctgctggagcagatccagaagatacccgaggaaaaaagcaaggtggaacggctgattcagccggaattaatagtcagggaatcaacgaaaccccaaatataaaagtatataaatttattttaaggaggatttttcaatgaaagcagcaaagaggtatcagttttggttcgcaacaggttcacaggatttatacggagacgaatgtctggcaaaagtggcggagcattctaaaattatcgtagagtctttaaataagtcaggcatgcttccctatgaggtagtgtggaagccaactttaattacaaatgaattgatccgcaagacctttaatgaggccaacgctgacgagaactgtgccggcgtgataacctggatgcacacattttcaccggctaaatcatggatcttagggcttcaggaatacagaaaaccattgatgcatttacatacacagtttaaccaggagattccttacgatagcattgacatggatttcatgaatgaaaatcagtctgcgcacggtgacagagagtacggccatattgtatcccgcatgggcgtcgagagaaaggtaatcgttggattctgggatgataaagaagtacagaagagaattgcccagtggatgcgcaccgctgtgggaatcatggaaagcagccatatccgtgtgtgccgtgtggctgacaatatgagaaatgttgcagtgacagagggagataaagtagaagcacagattaaatttggctgggaaattgacgcatatccggtaaatgagattgctgagtatgtggagcaggtatcccagggtgatattgatacactggtagaagaatactatgacaaatatgaaatcttactggagggcagagacccggaagaattcagaagacatgtggcagtacaggccggaatcgaaataggatttgaaaaattcctggaggaaaaagagtatcaggcaatcgtaacccatttcggagatctgggctccttaaaacagcttccgggtctggcaatccagagattaatggaaaagggctatggattcggcggagaaggtgactggaagacagcggctatggtacgtctgatgaagataatgacgcaggggattgaaaacgctaaaggaacttcttttatggaagattatacctataaccttgtgcctggaaaagaggggatcctgcaggctcatatgctggaagtctgcccaaccatctgtgacggtcccatcagcattaaagtgaacccattgtccatgggtgacagagaagatcccgcccgccttgtatttacagcaaaggaaggccacggtatcgcaacatccttaatcgacctgggcaaccgcttccggttgattatcaatgatgtagactgcaaaaagacagaaaaggcaatgccgaagcttcccgtagcaactgcattctggacaccggagccgaatctggcaaccggagctgaagcatggatttatgctggcggagcacatcatacggcattctcttatgacctcaccacagagcagatgtgtgactgggctgcagctatgggaatcgagagcgttgtgattgacaaggataccaagatccgcagtttcagaaatgagttaatgtggaattctgtcctttataaataaaatatggtataatcaggcaaaatacgcgggaggtttttagcatggatgtgaataatattaaaaatgctgtagagagcggaaaaacagcacttggtatcgagtttggttctaccagaatcaaagcagttctggtgggagaggataatgcccccattgcttctggaagttatgagtgggaaaacagctacttagacggtatctggacgtattcccttgaggatatctggaaaggccttcaggcaagttatgcccagatggctgcggacgtgaaaaaaacatacggtacagttctcacaaagatcggggcaattggcttcagcggtatgatgcacggctatatggcttttgacaaagaagataaacttttggttccgttccgtacctggagaaacaatattaccggagaggcttcagagaaactgacagagctgtttcattatcatattccccagagatggagcatcgctcacctgtatcaggcaattctcaatggagaagagcatgtctcacagatcagctttctcacaacccttgcagggtatgtgcactggaaactgaccggccggaaagttctcggggtaggagaagcttccggtgccttccccattgatgtggagaaaaaggactttcatgcagatatgatgcggcagtttaatgagctggttgcagataagaattatggctggaaactggaggaaatccttccgaaggtattagttgccggcgaaaaagccggtgaactgacagaagaaggagcaaagcttttggatgtatccggaaacctgcagcctggaatccctttctgtcctccggaaggagatgcgggaactggtatggccgctacaaacagcgtggcaaagagaactggaaatgtatctgccgggacttcggtgtttgctatgattgtgctggaaaaggaactctcgaaagcatatccggagatcgatctggtaactacacccacaggtaatctggtggctatggttcactccaataactgtacctcggatctgaatgcatgggtaggaatctttagagaatttgcagaatcctttgggatgaaggtagatatgaatcagctgtttggcactttatatcataaagcgctggagggcgacgcagactgcgggggattgttatcctactgctacttctcaggagaacatattacaaactttgaagagggacgcccattgtttgtccgcacaccggagagccagtttaacctggcaaactttatgagaacacatctgtataccgcactgggggccctgaaggtaggacttgacattctgttaaaagaagaagacgtacagattgacaagattctgggacacggaggactcttcaagacaaaaggtgtgggacagaaagtaatggcagctgccatgaactctccggtatccgtaatggagaccgcaggagagggcggcgcatggggaattgcgcttctggcctcctatatgataaataaagaagcaggggaaagtcttgacgaatacttggctcagaaagtatttgcaggtgacgaaggagagcggatggatccggaccccgcagatgtagatggatttgaagtatttattgaaaggtataaaaaaggactgcctatcgaacgggcggctgtggataacttgaagtgataaagaaaaggggacgtgttccttcgcagaagaacacgtcccaaaatgagtttgccctgtcccaaaatgggtatggggtgtccctttttacagtatggaggttgttatgttagaagaactgaaaaaagaaatatatgaggccaatatgctgcttcccaagtatggactggttacttttacatggggaaatgtaagcggcattgacagggaaaaagggttgtttgtcataaaacccagcggtgtggactatgataagcttacgccagatgacatggtggtcatggatcttgacgggaaccgtgtggagggggaatataatccttcttctgatacgcctactcatctggagctgtacaaggcatttcccaagattggggggattgtccatacccattctgcatgggcgaccagctgggcgcaggcaggcaggggcattccctgctatgggaccacacatgcggattatatgtatggggagattccttgtgcccgctgtctgaatgcagaggagattaacggagcttatgaaaaaaatacagggcttttgattgctgaactgtttaaagacagggattacgaagcggttcctgctgttttgtgtaagaaccacggcccatttacctgggggaaagatggccatgaggctgtgcacaatgctgtagttctggaggaagtggccaagatggctgcccgctgtgagatgctgaatccacaggtggaaccggcgccccagtcgcttcaggataagcattattacagaaaacacggcgcaaacgcgtattacggacaaagtaaataatttttgatgataacagcggttatttcctggaagaggaagtaaaccgctgtttttggttggatttcttttggttgtgtgtaaatcattcaacatgtctgtaaaaaaacaaacatgtttcaaataaaaacgtaccaaataattttccatgtaaaatattccactttttccaaatggttgttcgtagaggaaaacctgtacagatgctatgattttggcagtgaatttgtcgagtatgaccgcagaaggtctatacaagcaaacattaataatgaatggaggagaattcatgaaagaaagaatgagaagactggctgtgcttttccttacgggaacagtggtgattacatccactcctacgtcggcaatggcttccgctctgcagaatgacagtgcagcagaactaagcacagaggatcagcagcaggatgaggacacagacgagccagccgtggaaaacggggagacgcaggaagaaagtgagacggaagagaacgacctgagtgctgctcccgctgcagtaagtctggaagacgaagcgcagcctgctgctgcggcagaggaggaacaggagattgtacattacagcatggaggttcaggacggcctgctgaagaacaatgcccaggaaggcatggacggaactcttgaaaatctttctgaaaagaatgtaaatacatataatggagtaagcacgctaaaactggacggcaacggatatgtaaagcttccggcaggcatactcacagacaatactatgacggtgtcggtaacagttgcgaataccagagcagccgatcagatgctgtgggccttgggaaaagacagctggaattatactttctttactccggcaaacggcagtaaaaagatgaagctgtctgttgcacagcaggaaccgtataactctacaggtgcctgggcaaaagaaaataatattattcctgacacaggggctttccttgacggaagttatcagacgtatacgattgtctacgatggagagacaacagctatgtatttgaacggagaaaaagtaggaaccggcaacaatccttttgacctctctacctttgtggacgcagacggctccagcggttatattggaaaatccgtatacagcgcggacggtttgttccagggacagatcgccgattttgctattgctaattatgctatgtcagaagaagaggtaaaggcaaatgctgtcacagactttagtgattacataaaagcggatatacacagtgctatgctgaatgggaatgcgggcgcagatgctatttctaccaagctggcatttcccgctaaagtagacggagtggaattgtcatggggcactccgtccaacaccgatgtaattgcagctgacggtactgtaaaacctcccacagatgaagacgctgtggtagagattccggtatcctttgtaacgaatggcgagactgtgaatgaaacctttcaggtgactgtgactgcggtaaatccttccgagagactgcaggaagcagctgatgccctggagcttccctatgaggaagtgtacggcaacataacactgcctaccgcttctacctacgatacaacagtaacatgggaaactgaccatgaagaaattgttgatgtaaaggaacataaaaatgagggctatgaccccacgcctgcaggtcaggtaacacgtcctgcagaggatacagaagtaactatgacagctattgtcagtgacggtacactgagtgtagagaaagactttacgtttacggtaaaggctgcaccggaagaaattaaagagtcagattatacagactatttctttacttactttgccggtgaaaaatattctaatggtgagcaggtgtattttgctgccagtcaggatggattaaactggactgacttgaataacaatgatcctgtactcacatcaaagttaggggaacagggcgtaagagatccttatatcctccgctctccggaaggcgataagttctatatgatcgccacagatttaaaaatttatggcaataacgactggaatcgtgcgcagagggcaggaagcaaatccttaatggtttgggaatccacggacctggtaaattggtctgagcagcgtatggtagaggtggcaagagatgacgccggctgtacctgggccccggaggcgacctacgatgagaagacaggcgaatacattgtatactgggcatccagagttgctgaggatggctatggcaagcagagagtatattatgcaaaaacaagagatttctatacttttacagagccggaagtaatgattgagaagagcaatgatgtcattgacaccacgattctcaaggaaaacggcagctattacagatactccaaagatgaatccaagaaatgcatcaaagcggataaagtagatacactgctccatgcaaacccggttgatctgaacaccccggtgctgaacaatcagggcggtgtggaaggcccgaccatctttaaattaaatgaggatgacaacagtgaatggaaatactgtctgttagtggataattacgggggaataggttactatccgctggtatctaatgatttggacggcgacttcacgaaattaaccgaaggcttccgcatgccttctagagcaagacacgggacacctatgagaatcactgccgaggaatacaagaatgtagtggaggcttacggcgtaccggcaaaagaagaggaagaatcgaaggaacctgtgctggaatacaactttgaatctgatgcaggaaacagcattgcggatacaggcaaaggggacaatagcgcagatgacggtaccgcatacggcaatgcgaaatttgcagtggacgaggaaaccggaagccgggttctgcagctggacggaagcagcaatacctatgcagcttttccacagggctttatggacggaagaaatgtaatgacaatttccatggatgtaaaatctcagatgagcagcggaaacttctttacattcacatacggattaaacagcaacaaatataacttcttgaaggtcagcgggaaaaatgtccgctatgcgattactcaggacagttactcaaaagaaaatgaagtaaagactgcagatggggcagcagccggcaagtggcagaacgtaactcttgttgtagacggaacaaagctggatatgtatctggacggggtattagttgactcaaacccaaatgcaaaggttcttacttcagaccttgggaaaaatctgagcgcctatctgggcaaatccttctacagcggggacggctattttaaaggaagctttgacaatgtgaaagtatataacagggcgctgaccgctgatgagattcatgatgaaatatctgaggcagctattgtaaaagtagcggcagagggatataccatcagcaatcagtccattgataaaaatacaaagaagattcatctggatatcagcaggaataacagcgaaaaggctgatcttgcaaaagttcccctggacattaccgtatctaagaatgcggttttggaacaggaaaataagaaggaattaaatctgacaaaacctgcagagattaaggttacagtgaacggccgggaagaagtatggaccgtggaagcagcttgggctaataatacagtacttccaggggaatatgcggatcctgatattgatgtattagacggaaagttttatatctatcctacaacggacggcttcagcggatggtcaggaacgcagttccatgcattttcttctgaggatatgattaactgggtagatgagggtgttatcgtagacgtggcaagcaatgacacggtagccggaaccaacgaaaacggcgtggatattgcaggagtaccctgggcagtgggcagtgcatgggcacctaccattgaagagaaaaatggaagctattacttctatttctgcgcaaaagagagcaacgggaaatcagcaatcggtgtggcagtatccgacagccctaacggtcctttcgtagcagaggaaactccgctggtaacgatggagctctgcagccagaatggcgtgagcatgggtcagaccattgatccttccatttttacagatccggatactggaaaatcctatatgctgtttggaaacggcagcgcggcaatcgtagagctgggtgaagatatgataagtctggtgccggatacgatgcagaatctggagggtgcgaaagacttcagagaagcgattacagtgactaagagggacggagtataccactttacctggtcctgcgacgatacaggaagtgcaaattaccatgtaaattacggtacctctgattccctgtacggaccgataacattccagaaaactattctatccaaagatgcatcggaaagtattctgggaaccggacatcactcaatccttcagattcccggcaaagatgaatactacatcgcataccacaggttcgcaacacctctgggacagtatgattccggattggggtatcacagagaaacctgtattgacaaactggaatttgaccctgaaacaggtctgatgaaagaagtaacacctacacaggcaggtattacagaaccagtttcactgattgtagaaggctgggagccggacggcgacagatggagctatgtaaatcctgacggatcctatgtggtaaatgactggaaactgattgacggcaagtggtatcattttgataagagcgggtatatgcagactggctggctgcagttaggaaagacctggtattatctgaaggctgacggggcaatggcgaccgggtggctgcagttaggaaacacttggtattacctgaagtccagcggagcaatggcgactgggtggctgcagttaggaagcacctggtattacctgaagtccagcggagcaatggcgaccgggtggctgcagttaggaagcacctggtattacctgaagtccagcggagcaatggcgactggctggctgcagttaggaagcacctggtattacctgaagtccagcggagcaatggcaaccggctggttgttagacggaaagacctggtattatctgaaatccagcggagcaatggcaaccggctggttattagacggaaagacctggtattatctgaaatccaatggagcaatggtaaccggctgggtattagacggaaagacctggtactatctgaaatctaacggagcaatggctaccggctgggtaaaggtaagcggcaaatggtactatctgtacaacagcggagctatggcgtccaatacatgggtgggaagatattatgtaaatgcttccggagtatggacaaaaacaagataaaagtgcataattaaataaagcaaaagaaatagggaatatgtggagcaggcatattccctatttgccatactggaaggaggaatattggatgagaaggaaaggttttgggaaaaaggggttggctgtgattcttgcggcggcagtctgtgccggcagtttgtggccaggggtatctgtttatgccaaagaaggcggctctctgtcccaagggccggaagagggcgggggagagggtgactttgagcctgcggttggagagaagcagatcctagagatgaaacaggttttacgaatgaatgaggtcagccatgtcagacttacagaattcggcagtacggagcaagagaccttctataatcttcagtcagaacgttcggaggccgaacaggtgatagaaggaaggcccggccgcaaagcctgggaggacggatggttcagctatacgcttccggtaaaggcggaggaaaaaaactatctgaccactgtgtattatgggacggagagccaggaaccttatgacatactggttaatggcgacttagaagctttagaggagacagcatctgactcggaacgcaccgtttactctgacggcttttattcggtaaggcgggagatacctcaaaagtatctgtcagatccattcattacagtgaaatttgtacccaaagataattccggcagcgccctgtatgggctttatctggggagcggttatgacaagtatccggaactgcaggacttaagctttgacattggtgagatggatccggcattccaggttgaaaacagtgtatatacagtgagagttccccggaatacagataagataaatatgacagcagtgcctcataaacaggatggacttgtaaagctatatgataccgaccttgaacggtatgtgctggtggacgatgagaaggccgtgcctctctctttaagcggcgagaaaacagaggtcctgctgaaagggactgcggaagaccacagtacggagaggctttatacagtcagcgtagtaaaaaccggggataagtcacagcttaagggcctggttcagacagcagaaggtaaggtggaaaaggagtataccaaagaaacctggtcagcgatggctgaggaattaaaagcggcaaaagcactcctaagcaataaaaatgcaactcagacagagataaacagtcaggtagaaaaactgaggagaaccatagaaaatctgaaaaaggttccagctgcagataccggcaggtggatcactgacagcaagggaagctggtttcgatatcctgatggtacatatccgaaaaaagcctggaagttaatggatgggaaatggtattattttgatgaaattgggtatgtgaaaactggatggttccagcagggaaagacctggtattacagtgatacaaaaggtgtcatgcaaatcaattggaagaagataggaggagtctggtattattttaacggaagtggcgcgatggtaaccgggtggcagaagataggaggaacctggtattactttaacggaagcggggctatgcttacaaactggcagaagataggcggtatctggtactatatgaatggaagcggagcgatggcgaccgggtggcagaaaataggcggtatctggtattatttcaatgaaagcggagcgatgaagaccgggtggcaatggataagcggaagatggtattatatgaacggaagcggagctatgctgactggctggcagaagcttggtggcatctggtattatttcagcggaagcggcagtatggcaaccggctggcagaaaatcgggaccgtctggtattattttaacggaagcggagctatgctgaccgggtggcagaagattgggggaagctggtactatttgagcggaagcggagccatgctgattggctggcagaagcttggtggaaaatggtactattttaatcattccggggctatgcagactggatggctccatcttggaggggcttggtattacttgtatgaaagtggccagatggcggtcagtacctggatcggaacctcctatgtcaacgcctccggtgtatggataaaatagaaaatgaaaaagggaaggatcccatacagctgtattaaagaagcagcctgtatgggatttttttgtgttttttctaactttttttataaaaaaaccaaccaatatcataggaaaacataaagtaaatatcatattccacttaattccaatgggcctctgtggaagcgtgaaatctgtttatatacaatgaaatcattgaaaaatgagaaaaggagcgtacatttatgagaaaaaagaaaaagattgcaacacaatctactgcatttgttctcacaggggttatgttggccggaagtattcttccatcgctgccggtatacgcggaatcggacattctggctttgctgaatgagagtaagacgctggagatgtcctttgacggaaccctggaggataaagtgcttacggacagaagtgtgctggccaggggccaggacggcggtgagaaggaagctgtctacacagaaggggtgagcggagaggccttgcagctagacggtgctacctacattgatctgggaacggaacaggatatacagcctgagaatctgacggcctctgtatgggtaaaggcaaatgcagcgttgtcaggggagcagctgattacctggaataagggagcatataatgaagatggctggtatctgaacaccacagacaataacccactgtttttatctgtgggaacggcagtcagcggcagccagccacaggaatattatgtggaaggcaaacgctccgagtttttccccgctggtgaatgggtacatgtggcagtgacttataacgcagagacccaggaagcagctatgtacagaaacggagaaaaactgacggtaaaggcaaaatacaattccagcagtggaatacatggatctgactgtacgaaaactctgggcaacaatggcacggttcacaatggcggctgttccaatatcagtctggatgagtatgcggtatacagtgcagtggctgacgatgctcaggtacaggagctttataagctgtatgcagacacctcaggggaaggcgaagaaccggatccttccttcacagaggaaagggttctgaacttggcctttgacggagataccacagacacttctgagaaaaagcatcccgttacgattgttggggagaactatgggtatatccagggcgctgccgagggaacccaggcgctggagctgaaaggaaaaacctatgttgatttgggaaccgacgcttctttaaatccctccagccttaccttctctttctgggtaaatccaacccaggacatgggaggcggggaacatctttttgtgtggaataaagaagcctactattcagatggctggtatctgtcttctgaaaacaaagataaaccgctgagtatatcgattggatcttccaatgactggaaacagccatacaaggttggggtagaggcggacagaagcgagtttttcccggtgggagagtggacgcacatagctgtcagctttgacgatacaaccaaggaagttaccatgtaccggaatggaatccggcaaaaggtaaccgtatttagtcctattggaacagacggggcagacggaaccattgatcagggaaatgagatgaaaaaagcgttgggatataacggtcccgtgcataacagtacttatggtatctttgccatggataatgtggctcttttgaaccatgcgtctacccaggacgaagtattggagctgtttgaggaaacgcaggcctttgacaggcagacgctggtcgacgcggacgcagaggcgttatctcttccggcatataccagaaaggatctggagctgcctgataaggggacaaacggcagcaccattacctgggaatccagccgcaaagacattatcacagacgacggtaaggtaacgcttccggaggatgcggacgcggaggttaccatgacggctcatcttgcttacgggaaggactatacggctgtaaaagagtgcaaagtggtagtatctgccgctaattggaatcttactaataacgggatggacaaggtgactctgtcagacagctaccttgtgaatgcacagcagaaagagtatgattacctgctttccatgtcctccaacaagttcttatatgaattctacagggtggccggcctggatccactaacagacagcggctatggcggatgggagagaagcaacgatacaaacttccggggacataccttcggacattacatgtcggcgctgtctcaggcttaccttggctgcaaagacgaggctacgaagactgctcttttggaacagatgtctgatgcggtggctggtttgaaagagtgccaggacagctatggaactacacatccggaaagcaaggggtatatatctgcgttcagagagagcgccctggatgctgtgcagggaagcggcggaactgatgagaatgtactggtaccttggtataacctgcataaggtactggctggtctgatcgatattgcgaagaatgtggacggacaggtaggggaagaggctttggaagtcgctatgggcttcggagattatatctatacttccagaaccagcacatggacggacgcccaaaagaagagaatgctgacgattgaatatggcggcatgaacgaggcgctgtacgagctgtataacattaccggaaacccggactacaagtcagcggcagaatgctttgatgaaaccgagttgtttgtacagctgagtcagggaaaggatgtgttaaacggaaagcatgccaacactaccataccgaagttcatcggcgctttaaaacgctataccgtactgacacaggaacgctactatggagaactgacacaggaagaaaaagataatctggaaatgtatctgacagctgcagagaacttctgggatattgttgtaaaagaccacacctatattacaggaggcaacagtgaatccgaacattttcacgccgcaggctctttggggcagtatgcaaataacagaacctgtgaaacctgtaatacgtataatatgctgaaattatccagggcccttttccaggtaaccggggacgttaagtatatggattattatgagaatacatatattaatgcgatcttatcctcccagaatcctgagaccggaatgagtatgtacttccagccaatggctccgggatattacaaactctacagttccccttatgacagcttctggtgctgtaccggaactggcatggagaactttaccaaactgggagataccatttatctgaaaaaaggaaatcagctgtttgtaaatatgttcttcagctctgcgtatacagacagcgaattccaaatttcccaggaagccaatataccgaacagtgataaagtgagctttaccgtagcagcagttccggagggcggggctgtaatggtaagaaagcctgactggctggcaggaaaggcagctgtaaccattaacgggacagcatctgaattaaaggtgacggatagttactatcagcttgacggcctgaaagcgggagataaggttgagattaccctgcccatggaagtacaggtatatgaaatgcctgatgacagttccatggtggctttccgatatggccctgttgccttgagcacgggactcggcaccaataatatggatcaaagagagggggcaggcatcattgtatatgcgcctgttctggacaaatcagctgctgacaccatcaccatgacagatgagaaggtagaggactggaaggcaggcatcaaagagaatctggtccgcatcgaagacacagaggacggacaggtgcagtttgcgctgaggggaacggatcaggatgataagctgttctacacgcctcactatctgcggtacaacgaaagatatggattatatatgaatctctcagagcctgattccgagaaataccagcaaaaattgctggaaagcaaagagacattaagagaaaaggaaagcagctctgcgtacctgacaaactttgacaataataactcagagttctctcttggactgaaacattctgagaattctgaggtgggtacctatggaggaagacaataccggcatgcagaaaaggacggttggttcagctacgaattgcctgtgaataaagaggctgggaaaaattatctgtttacaacttattatggcggagataagggcagaagctttgatatttatataaacggagaaaaattcgtcactgaaacattatctgatacagaatatcctttgacatcggacggattctatacagtaaaaagagaaatacccggaaaatatctggagggagacagtatcacagtgaagttccagtctacgggaggctttgtaggaggtctatttggcgtaagtgtgggaacagattatgatactaacgctgaattaaagcagctttccttcgatatgggtgaactttcacctgaatttaagggggatgttaaagaatacactttaaccgttcccagagactcaaagtcagtaagaatgacggctgttcccataaaggccagcggtctggtatacgacggagaggtgctgtttgacgatacaaaagcacgtctggtaaaactagagggagacgcaacagaaatcctccttacaagcaaagcacaggatcacaagagtttaacccagtatacgattcatgtggtgaaaggggatgtagaagagaagaaagaaggatggcagcaggacggcgacagatggctgtatatgaaggaagacggcacttacgtggaagatgactggaaattgattgacggtaagtggtatcattttgataagagcggttatatgcagacaggctggctgcagctgggaagcacctggtactatctgaaatccagcggggcaatggcaacaggctggctgcagcttgggaccacctggtattatttaaaatccagcggagcaatggcgacaggctggctgcagttaggaagcacctggtactatctgaaatccagcggggcaatggcaaccggctggttgctggatggaaagacctggtattacctgaaatccagcggagcaatggcaacgggctggctgcagttaggaagcacctggtactacctgaagtccaacggagcaatggtgacaggctggctgctggatggaaagacctggtattatctaaaatccagcggagcaatggcgacaggctggctgctggacggaaagacttggtactatctgaagtctaacggggcaatggcgacaggctggctgctggacggaaagacctggtactatctgaagtcaaatggggcaatggcaacgggctggctgaaagacggcagcagatggtattatctgagagacaacggagctatggcttccaacacatggatcggaaaatattatgtaaataagtccggtgtatggaccagaacaagatagagtagaagtattacagcgagggatgtgttccgaaaggaacatatccctcttattgtgatgaaatcgtaagaaattaaacaaaaatcatataaaaacgtacaacaaaaataaatttccaaaaaaatccacctttttagtaaatgcgtggagagacagaatctgtgaaatctgttataatcctccatgaagctatataggtaatatgaggcagaagacttcaattaattccttggagatttctgcctttaatatacagcggaacttaggggcatacaggatggcaccccttactacatacgctgcgggcgggcataccgcaggtttctgcggttgttcatatctcattgacgttcacagaaatgggaaaggctggaggaggagaaaaacgtgttaaaagtgtttttagtggaagacgaagtagttatgcgcaaggggattaagaataatataccctgggaaaaagaaggctttgtttttgtgggggaggccagtgacggggaactggcgtatccgctgataaagaagacgaagccggatatcctaatcacagatattaaaatgccttttatggatggattggaattaagcagtattgtgaaaaaagaaatgcctaataccaagattatcattctcagcggatatggagaattcgactatgcaaaacaggctattagcattggggttaccgattacctgctgaagcctatcagctctgctaagcttctggaatcaatcaaagaggtggcggctgtgattgaaaaggagcaggagcagctgaaaatgatggagcagtacgaaaatgagatgagagagaatattaccatcaaacgccaaaacctgttccagaaaatacttgctggacaaagctccgctatggagattatggaggaggcgcaggacttgggtctggagctcaccgccccggcttatctggtaatgatgtttaagactgttatctacggagactccagctgctattccgaggcgctggtgaaagcgtcaaaagagatcatggatctggcggcctcctatgagcaggtactgaccttcgacagaggattggaaggcctggcctttgtcattaagggggatggcgaagaagagctgcaggattttacggcagagtttgtaagagccctgaaggctgtgatggacgggtaccacagtgtggaatatttcggagggatcggcagcgtagtgcagcgtctaagagatctgagccagtcgtatgatgcggccagcaaggcattttccagcagattctttacagagtggaataaaataatcagctataaagatgtgagcaaaatgcatcacctaaacgaggataaaatcgatctcaatgccattcagtcttcccagatggatcgaaaagaagtagaagattttctgaaaaatggtacgattgaggaagtagacaattttattgaagagtatttcctgcgggtaggggaaagcaactataaatccttgatgttccggcagtatattgtcatggatctatttgcctgtgtgcttggattcctggaagggctgggggtaaatccggacaaattgccggaggagctgcagaatattaatgagacggccacaaagatcctttccatagaaaatctgaagttccgtctgcggaagcttttctccgaagcaatccagctcagagacaacgcatctaagggaaagtttcatctgctgctggaggaagccaaacattatattaaggaaaactattaccacaatgacatctccctgaataccgtggcgaccaatgtcaatatcagtcccagctatttcagcagcatcttcagccaggagaccggacagacatttaccgaatatctcactgaggttaggatcgaaaaggcaaaggagcttcttatgtgtacaaatcttcgggcctcagagataggctatcaggtaggatataaggactcccactactttagttacatatttaaaaaggaaacaggctgtaccccaaaagaataccggatgagaggcaggtaattctatgatgatgaaattatctctgagaaagcggcttactgtgcttacctgcagcatattggtgccattgtgtatcctggtgctctctctgacttttatgctgctttcttacggacagaaatatgacagtgttgtaaataacatttcagtggtcaaccgatataatactacatttaaagactgtgtggattatactgcgtaccgcatggtaatcgggggaaagactgcagatgaactggtggcggccaaggatcccagggatcagtatgaggggcagaggatccaggatccgaaggaactgattggaaatgccagaacggattttcagtatctgctcactgtgacaaaggaccaaaaaaatgccagaaggatacgctggatattaaagtgcctgaatactctggatgacagcattaacaagatggaaaaacaggtgaagcttagcgggtactatgcggacaatatgaatatcctgatcaacggaatctatattattacagaagatgtccaggaaaacatacaggaatatgtttactatgaaactttaggatttgaggaaatccgccaggatctttccagcagcatcagtcactcggtacagataagtacagccgctctgattgggatactgggcatcagtatactgatctccagaaaaattgcaaacagtgtaacaaaccccatccgggaattatgtgctgccacagagctggttgcccacggggattttacttcccctacggaaattgactccggcaatgagctccaggtactgaccaacagctttaaccatatgaagggggccatcgcagtcctggtggaggatattaagaaagaacagaaaaagctgcgggttacggagctgcgccttctccaggcccagattaatccccattttctctacaatacgctggatacgattatgtggctggctgagggcggggatacgaaacaagttgtgcagatggtatccgccttatctgattttttcagaactgtgctcagcgagggcaaggaaatgattaccatacaggaggaggaagcgcacatccgcagctatctgattatccagcagtttcgctatcaggatattatggaatatgagattgacattgaaccttccttatatacaaacctgattttaaagctcaccctgcagccactggtggaaaatgcactgtatcatggaattaaaaacaaaagaggcggagggaaaatttgggtaaaaggatacaaggtggaaaacataattgtatttaaggttacagataacgggatcgggatggatgaggaagagcttaaggccctggaagaccatgtaaaagagcgtaaaggaaaaaaaggcggcagctttggccttagaaatgtaaatgagaggattcaaattacatacggggacgaatacggtctgtcttttgagagcaaaaaggcctgcggtaccacagtgacagtcaccttgcccgcacttggttaaaagaaattatacctttttcaaaaaatatctaacaaacagccaaaaactaaaaaaatcgtaagataaaatacaaaatagaggaagttttcggttttttttatttttaaacttggtagaattagatacatcagaaggatgtaaaaaacatctgaatggatactattaaactataataaggaggaactaaagtatgaaaagaaaggtattaagcgcgttattatgtgcaacaatgatggcagggatgctggcaggctgcggaaacgactcttcagaatccacttccactgacacagagacaaagacagagagcacagatactgcagaagctggggatgaggctgatgccagtgacgcgaaagcaggagatgacgatttaatcgtagttggttatgcacaggttggtgcagagtctgactggagaactgctaatacagaatccttcaaatctacttttacagaagaaaacggatacaagctcatctttgatgacgcacagcagaaacaggaaaaccagattaaagcaatcagaagctttattcagcaggatgtagattacatagtagtagcacctgtagtagaaaccggatgggaaaccgtacttcaggaagcaaaagaagcaggaatccctgttattctttctgacagacagatggatctttccgatgactctctgtatacctgctgggtaggcggaaacttcgtaaaagagggtgaagacgcaggagactggctggcacagtatctggagtctaaaggaaaaggcgaagaagaaatcaacatcgtaaccttacagggaactatcggagcatctgctcaggttggccgtaccgaaggttttggaaacaaactgaaagaacacagcaactggaagatgttagatatgcagaccggagaatttacacaggcaaagggccaggaagttatggagtccttcctgaaatcctatgatgatatcgatgtagtaatcgcagagaatgataatatggcattcggcgcaatcgacgctatcaaagcagcaggaaagacctgcggaccagagggcgacatcacaatcatctccttcgacgcagtaaaagcagcatttgaggctatgatcgcaggcgacttaaactgtgcggtagagtgtaacccattacacggacctcgtgtagctgaaatcatccagaagttagaagctggtgaagaagtagagaagattcagtatgtagacgaaagcgtattcccggctgatacagcagctgagttcatcgacggacgtgcatactaatcagaatatctgaagcaaattaaatcatctatcacaggtccccggagattttcaacaactccggggacctgtttgtttccaggcggggattctatgatttctgagggaaaagatgaacaagttttaaaagaatatacaagcagaaaaagaagcaggagaggaattgtatttccaggaatacaaaaaataacacacttttttccaattaaattgtacaaaacttcttttgagcaaaaaaatcaaaaaatatattacaaaacagcggagcctctccgttgttttttatatggaaattgatagaattaatactgtaatcagggtgcagagagcaccggaagataaagaataataaaaatgtatataaggaggaacaacatgaaaagaaaggtattaagcgcgttattatgtgcaacaatgatggcagggatgctggcaggctgcggaaacgattcttcagaatctacttccactgacacaaaaacagagagcacagacaccgcagaagctggggatgaagccgacgcagcagatgcgaagggagacgatgatttaattgtagttggttatgcacaggttggtgcagagtctgactggagaactgctaatacagaatccttcaaatctacttttacagaagaaaacggatacaagctcatctttgatgacgcacagcagaaacaggaaaaccagattaaagcaatcagaagctttattcagcaggatgtagattacatagtagtagcacctgtagtagagaccggatgggaaaccgtacttcaggaagcaaaagaagcaggaatccctgttattctttctgacagacagatggatctttccgatgactctctgtatacctgctgggtaggcggaaacttcgtaaaagagggtgaagacgcaggagactggctggcacagtatctggaatctaaaggaaaaggcgaagaagatgtaaatattgtaaccttacagggaaccatcggagcatctgctcaggttggccgtaccgaaggttttggaaataaactgaaggaacacagcaactggcatatgttagatatgcagaccggagaatttacacaggcaaagggtcaggaagttatggagtccttcctgaaatcctatgatgatattgatgtagtaatcgcagagaatgataatatggcattcggcgcaatcgacgctatcaaagcagcaggaaagacctgcggaccggacggggacatcacaatcatctcctttgacgcagtaaaagcagccttcgaggcaatgatcgcaggcgacttaaactgtgcggtagagtgtaacccattacacggaccccgtgttgaggagattattcagaagttagaagctggcgaagaagtagagaagattcagtatgtggatgaaagcgtattcccggcagatacagctgctgatttcattgacggacgtgcttattaataattaaaagcattcgcaacgatagaaggccaagggcggtgaggcaggggagccttatgtaaggctcccctctcatgccttagaataacagtgatgaaaacaggaaaggcggagatgatatggagcaggatatcgtattaaccatgcgaaatattgataaaaacttcccaggcgtaaaagctctgcagaatgtggattttactcttagaaaaggtgagattcatgcacttatgggagaaaacggagcaggtaaatctactctgatcaaagtattaacaggcgttgaagaatttgaaacaggtgaaataaagatagagggcattgaccatcccatcatcaacaaatcccctcaggaggctcagattcatggaatcagtactgtgtatcaggaagttaacttatgtcctaatctgtcagtagctgaaaatctgtttatcggcagggaacccaaaaagggaggcatgattgactggagaactatgaacaagaagtctaaggctttactggaaggtctggatattcatattgatgtaactgcggcacttgaaaattattccttagctcttcagcagatgattgctattgccagagcggtggatatgtcggctaaggttttgatactggatgagcctacgtcatctcttgacgacggtgaggtggaaaaactcttccatctgatgaaccgactgaaagaacagggcgttggaattatctttgttacccatttcctggaacaggtatatgcggtatgtgacagaattacagtactcagaaacggtacgcttgttggggaatataagatagaagatcttccaagagtacagctggttgcaaaaatgatgggtaaagattttgatgatttggctgccattaagaaagaaggggcctcaagcgttaaagatgaagtcattattgatgccagacagctgggccataaaggcacgattaaaccttttgacctgaagattaataaaggagaggtcatcggtcttaccggcctgctaggatccgggcgttccgagcttgccagaagtatctatggagcggataaaccagattccggagagttgtatgtaaaaggaagcaagttccatgcaaatacaccactggatgctatgatgcagggaatggcatatctgccggaggacagaaaggcagaaggaatcattgcggatctttctgtgcgcgagaatatcatcattgcccttcaggcaaagcgcggtatgttcaaattgctgagtaagaaggagcaggaagaatttaccgacaaatacatagatctgctgcagatcaagactgctgaccgggaaactccgattaaacagctcagcggcggtaaccagcagaaggtaatcctgggcagatggcttttgactaatccggattttctgattctggatgagcctacccgcggtattgatatcggtactaagaccgagatccagaagctggtgcttaagctggcagacgagggtatgtctgtgatgttcatttcttctgagatcgaagaaatgcttcgtacctgcagccgaatggctgtacttcgtgacggctccaaggttggagagctcaaagaagaagaactctctcaggattccatcatgaaagcaatcgcaggaggtgcaaattaatggaaaaattaaagaagattacaagctatcgcctgtttcttccactgctgtgtctggctattgtgttaatgattaatattattacaacacctacctttttccagatcagtgtgaaaaacggggtattatatggttatattattgacgttatcaaccgtgccagcgagctggtaattctggccgtaggcatgacactggtagtatcctcctccgcaggaaccgacatctctgtgggtgcggttatggcggtggcaggcgctgtgtgctgttttgttctggctggaggccagcaggcagtaaacgcttattcgaatccttacattcttggatttttagcggctcttgttgtcggtgttatctgcggatgctttaacggcttcctggttgcgaagatgaaaatacagcctatggttgccacattgattctgtttaccgctggccgtggtattgcacagctggtaacaaagggacagattacttacatccgtgtggacagctttaagttactgggatctaatattccggggctgcctctgccgacacctattttcatcgcaattgcagttgtcattataaccgtaattattttgaagaagacggccctaggtatgtatatacagtccgtaggtataaactccagggcatccaggctggtgggcctgaaatccacaatgattatcttccttacttatgcattctgcggattatgcgcaggtatcgcaggtatgattgcaacatcccgtatctattctgcggacgcgaataatatcggtctgaacatggagctggatgccatcctggctgttgccttgggcggcaactcactgggaggcggaaagttctctttgatgggaagcgttatcggagcttacaccattcaggcgctgaccacaacattatatgccatgagtgtttctgctgaccagattccggtatataaggcaatcgtagttatcgtaattgtagcactgcagtcaccggaatttgctaagattagaaaaaaaattgcaggtaaattccactcagaaaaagcagaatccaagaaggaggtggcataatggataataagaaaatgaaaagcaagaagaatatagacggtaatgcgttcttactgctgattaccatcgtgctgttcttcgccatgtatatcattggagtcattgcattccatcagcagggattcggtaagacccagaactttttaaatctgtttatttccaatgccggtctgattgtcattgctgccggtatgacggtagtcatgataacaggaggtattgatatttctgttggttccgtggttgccctgacttgtatgatgctggcctggatgatggagaataaaggtatgggagcaatcccggcggctatcattgtactggtaatgggactggtattcggttttgtacaggggtggttggtagcctatctaaagctgcagccctttatcgtaacactagcgggaatgttctttgccagaggtatgacggctattatcagccaggacatgatcagtattaaaaatgaaatgttcttaagctgggcaaagtataaaatatatcttccttttggaggatatgtaaatagaaaaggagtaatgatctatccttatatttacccaagcgttatcatcgcactgttagtgctggtaatcgtgtttataatgctgaaatataccaagttcggacgttctatctacgctgtgggcgggaatgagcagtcagctcttctcatgggactgaacgtaagaaaaacaaaactgaaagcttacatactggctggatttctcacaggcctgggcggatttctgttctgcctgaatacctgttccggattcgtagagcaggcaaaaggatttgagatggatgccattgcatctgcggtaatcggcggtacgctgctgaccgggggtgttggtaatgtcttcggaagtctctttggagtattaattaagggtactatagaggcatttattaccttccagggtacactttcctcctggtggacaaagattaccattgcagcgctgctgtgcttcttcataatcctgcagagtatctttgcatctgcaaaagcaaagaagaaaaaataaaaaggtaaaaaaggggacgtgttctttctaaaaggaacacgtcccaaaatcgatctggggtgtccccaattgatgtaaattaaaattgtctagtaagtcttgacagttttatttttttgctttatagtatgactatacccccggggggtgttatgaggcggcagacataaggaaaggagttctgatatgcaggctgataagaaaaaaatcgcccggctgttaaaaacagccaggggtcagatggatggtatcttaaaaatggtggaagaggacaggtattgtattgacatttcacagcagctgatggccacagaggctattttaaataaagcgaataaggagatacttacggcacatctgaagtgctgtgtagcggatgcgaaaagcgatgaggaaaaagaggctaaaattgatgaattagtctctatgcttggtaagatactaaagtagtagaaacgatttaacgaaaggagagcgcagatgaaagaaaaatttgatgtaactggcatgacctgttctgcatgttcctccagggtagaaaaatgtgtggcaaagttagagggcgttcagtctgtgagcgtcaatctgctcacaaacagtatgcaggttgactttgatgatagcagactgtccccgggaggcattgcaaaggcagtggaaaaagcgggatatggcgccagcgtacatgaggaaaaagctggcagtgaccggaaggctgaaaaagcagaggcaggagagaaccctgtagaggcacagctgaagaatatgaagtttcgcctgtggatctcttttggatttctgatccctctgatgtatgtatccatggggcatatggcaggactgcccctgcccccctttctggctggactggagaatgcagtgggatttgcactgacccagtttctgctgtgcctgccgattgtctatgtgaaccgggtatattatatcaagggctttaagacattattccacatggctcctaacatggacagcttaatcgctattggctccacggcggccctggtttacggaatctttgctatctatcggatgggatacggtctgggcagcgggaatatggaactggtagaacagtaccatatggacttatactttgaatcggcagcaatgattctcgcgctgatcaccctgggtaaatatctggaaaccagatccaaggggagaaccagcgaggccattaccaagctgatggatctggcacctaagacagctgtagtacagcgggagagcggtccggtggagattcctgttgaggaagtagtggtgggtgacactgttcttgtaaagccaggtcagagcattccagtggacggagtgattcttgagggaaataccagtgttgatgaagcggctatcacaggagaaagtatacctgtgcagaaatcggaaaaggatgctgtcataggggcaaccataaataaaactgggtttatcagtatacgggcttctaaggtaggggacgatacaactttctcccagattatccggctggtggaagaggccagttccagcaaggcccctattgctaaaatagcagacaaaattgcaggggtatttgtcccggttgttatgggaatcgctctgctcactgcaattgtctggctggtatctggagcgaccttcgaatttgccctgtcttcagctatctgtgtgctggtcatatcctgcccctgcgccctgggtcttgcaactcctgtggcaattatggtgggaaccggcaaaggtgcggaaaacggcatcctgattaagtcaggagaggctttggagacagcacacagcatacagagtgtggtgatggataagacgggcaccataacccagggcaaaccagtggttaccgatatccttctcttatccggggacaaagacaaactactacaggcggctgcgggtttggaagcaaaaagtgagcatcctctggcagaggccattatggaatatgcttcccgggaagggattgcggtacctgcagttacagagttccagtccctgcccggaatgggagtggaaggcaaggttgagggaaatctttactacgcgggaaatctccggctgatgcgggaaaaggcaatcaatacccagaagtgtgaagcacagctgtccaaactggccgacgaaggaaagacccctcttctgtttgcagacagtaaaaaggcagttggaattattggggtagcagatgttgtgaagccaaccagcaaagaggcgatccgccggtttacggagatgggaattgaggttgtaatgcttaccggggataataagagaacggctcaggccattcaaaagcagctgggaatccagaaggttattgcggaagtccttccccaggacaaggaaagagagatagccagactccaggaagaaggcaagacagtggcaatgatcggggacggagtgaatgatgctcctgccctggcaagggctgatgtagggatggcaatcggtgcaggaaccgatgtggccattgaaagtgctgacgtggttcttatgaaaaatgatttattagatgcagttactgcagtccgcctcagcaaagcggtaatccggaatatcaaacaaaacctgttctgggcctttttctataacagcctgggaattcctctggcagcgggagtattctaccactggctgggatggaagctgaaccccatgtttggagctgcagcgatgagcttaagcagcgtatttgtagtatccaatgcccttcgtctgaagctgtttaaaagcagcagcaaaacctgggagtctgcagggcagccggcagaagaagaggcggaaataatagagaatgaaaaggagagaaaagtcatgaaaaaaacgattaagattgaaggaatgatgtgtcagcactgcagaggtgctgtggacaaggcgctgaacgccatggagggagtaactgcgcaggtaagcctggaggataaggctgcttatgtggaaatctccggtgatgtcagtgatgatatgttgaagcaggcagtgacagaggccggctatgaagtggcagggatttcagaataaaatcagcttgacaaatgcagacatagactgtatactataaaaaatcaaataaaataaatgcgatgacaaggaggagtacatactcaccaaagtcccagagagaagatggatggtgtgaatcttcacggaggaagtatggaagtagcctttgagcagtgagacgaacaggcggcctgcccaagtagcactcaacgtatctttcctacgttacagggaaaacggtatcgatagcaatgtctgtactgataagtgtgaaactgtcaggaggtgtactatccgtactggcagagtgcgggaagcagcagtcttcctgaatttaggtggtaacacggatgagatattcgccctaagcttttgtaagcttagggcttttttatcgcagttatccagaaaaaacatataaaaggagggtcatttcaaatgaaaggaacagaattatttgtaaaagcattgcaaaaagaaggtgttgattatctgtttggctaccccggcggttatgccattgatatctttgatgaactctataagcaggactccattcagatgatcctgcccagacatgagcaggggctgatacacgcggcagacgggtatgcacgggccacaggcagggtaggtgtctgtctggtaaccagcggaccgggggctaccaatctggtaaccgggatagccacagcaaattatgacagtgttcctcttgtgtgcttcactggacaggtaccaacgaatctgataggaaatgacgcttttcaggaggttgacatcgtagggatcacaagaagtatctgcaaatatgcggtgactgtaagacggagagaggatctggggcggattatcaaagaggcattttatattgccaacactggtaaaaagggtcctgtagtagtagatcttccaaaggatattatgctggaagagggagacagcttgtatccgaagcaagtatccatcagaggctacaaacccagccagggggttcatatcggtcagataaaaaaggctacggatcttctgaaaaaggcagaacgtcccctgtttttaatggggggaggcgttacgatctccagaggacaggcggaagcgaaaaagttggcagaacacactggaattcctgtaatcacaactataatggggcgtgggtcactgcctacagaccatgagctgtactttggaaatgtgggaatgcacgggtgctatgcagcaaataaagccatctctgactgtgacctgctgttttctatcggaacccggttcaatgaccgtataaccggtaagctgggagaatttgcccctaatgcaaaaataattcacgttgacattgatacggcctctatctccagaaacatacaggtagatattcctattgtggcagatgcccgggatgctatggaggccatacttaaaaatatgccggagggtgagcataaagagtgggttgcccagctgaaggaatgggatcagaagcatcccatcgacatgccggatggggagggcatcaatcctcagaagattatccgggagatgaaccggcagtttgaggaggcgattgtagtaaccgatgttggacagcatcagatgtgggtaacgcagtatctggagatgacggaaaagaaacagcttctcacctcaggcggactggggactatggggtatggtcttccggctgccctgggagcccagctggggtatccggatacaccggtcatctgtgtggccggagacgggggcgttcagatgacaatccaggaaatggccatggcagcggcttatgaacttcctgttattctctgtatttttaataacagttatctgggaatggtacgccagtggcagcagctgttctacgataaaaggtattcctctacctgcaccaggagaagaaaatcctgtgagggcaagtgcaaaggaccgggaactcagtgtcctccttatgccccggattttatgaagctggcagagggatatggtgcaaaagggatgcgcgttgagagagaagaggatatcagcagggcatttgcatttgccagagagaacaggcagggaccaaccgtgttagagtttattatacaaagtgatgagcttgtgcttcccatggtacagggagggcagccattaagtaatatgatactggaatgttaggagggtgagagagatgaaaaaaagatggatttctttatatgttgaaaatcaggtaggcgtattggctaaaatatccgggctgttctccggaaaatcttacaatttgacaagccttacggtgggagagactgccgataagaccgtttccaggatgaccatcagtgtggacagcgatgatgcaacctttgaacagataaaaaaacagctgaaccgctgcgttgaagttatcaaggtcatagactttacaaacatccctattcacagaaaagaagtgctgtatatcaaagtaaaggattgtgacgagagagcgaaaacagagatcttccggatcgcagaggtatttggactcaatatcgcagattatggaaaaaatgccgtattattggaatgcctgcagaccgagaccaaaaatgatgacattatccgcctgatttcggcaaatttccagaatatagaagtggtgcggggaggcagtgtagccattgaatccgtaagtattcaggagaaatagacaaatttactcaaagaattcaaatgaagtgttgctttttgtgaataatgtatagtaaaatgagaaagacaaaactatacacgggaagtgctccggggggaaaggggcacttcctgaaaaacaaaaaggagtgttaaaggtatggaacaagtggtgtatgtagcagtggttgctggtatactggcgttagtgtttgctttttatctggccagcaacgtaagccgacaggaggacggcaacgacaaaatgaaagaaattgcaaaggcaatcagtgaaggtgccagcgcatttctcttctccgaataccggatactggtaatctttgtggcggtattatttgttgtaattggatttggaatcgggaactgggtgacagcggtctgctttctggtaggcgcgggtttttcagttctggccggctacttcggcatgaatgtggctacaaaggcgaatgtgcgtacagccaatgctgccaggacaggcggcatgaacaaggctctgacagtggctttccacggcggagcagttatgggaatgtgcgtagttggtctgggactgttaggatgcagtctgatttacgtaattacgggaaatgtggatgtactgtcaggattcagcctgggtgcgtcatccattgcattatttgcgcgtgtaggcggcggtatctatactaaggcggcagacgtaggcgcagacctggttggtaaggtggaagcggggatccctgaggatgatcccagaaatcctgcagttatcgccgacaatgtaggtgataatgtaggcgatgtggcaggtatgggcgctgatttgtttgaatcttatgtaggctctctggtatcagcggttactctcgggattgttgtatatcaggcgaaaggtgctgtattccctctggtacttgccgcaatcggtattatcgcatccattatcggaagcttctttgtcaggggcggagagaacagcaagccccatcaggctctgaaaatgggaagctacgtatcaggcggtctggtgcttatctgttccctgattatgagcaaggtattttttgacgattttaaggcagccgcagcgattatcgcaggcctgctggttggaattgtaattggtattgtgacagaagtttatacctctgatgagtacaagtcggtgaagaagattgcccagcagtcagagacagggccggcaaccacgattatcagtggactggcagtaggtatgctttctacctgtgtccctatacttctaatctgtatcggtatctttgtgtcctataaagtgtgcgggctgtacggaattgcccttgcggcagtgggaatgctttccacaacaggcattactgttgcggtagatgcctatggtcctattgcagataacgccgggggaatcgctgaaatgtccggtctggaccacaaagtcagagagatcacagacaagctggactcagtgggaaacactacagccgccatgggaaaaggatttgccatcggttccgcggcgttaacggctctggcattgtttgcctcctattcccaggctgtgcagcttcaggtaattgatattctaaactctaatgtaattattggattgttaatcggcggtatgcttccgttcttattctcagctttgaccatggaatctgtttccaaggcagcttataagatgattgaggaagtaagaagacagttccgtgagattcccggcattatggaggggacaggaaaaccggattataagtcctgtgtgtctatttccaccacagccgcactcagagagatgttgattcccggcgtgatggcggtattggcgcctctggcagtgggaattgttctgggcacagaagccctgggaggccttctggcaggttcactggtgaccggtgtgctgatggcaatctttatgagtaatgccggcggagcctgggacaatgccaagaagtatattgagggcggcaatcacggcggtaaaggcagtgaggcccacaaagcggcagttgtaggcgatacggtaggagatccctttaaggatacttcaggcccgtcaattaacatcttaattaaattaatgacagttatttccctggtgttcgcaccgctgttcctgagcattggaggacttttgggctgatagccacaaaaagtataaaatgtcttcacgaaacgttcacaacttttacatggggaggtcataattggaaggtatgataaatgcatagtaacaaaacgttactgcaattaattttctttttcatactgccttgcagcaatgtgaggcattccttccactaataagtatcatcatactttttataaaactcctcaaaaaaggtcctgttcgaatgaacagggcctttttgctgtaaacatatccggataaaacgcaagattgataaagaaaatggcagtattggggatatacatatgtataaatatctgtaataatgaggttgtaattaaaaaagaatgtaaattatgtgtttaatttaaaaaaatcagattatagcaaaaattcaaatcggtttaagacgattatatttgagggattaagggaaggatacgctatatggatatttgtatggcatggtaatgtatatggaatatataatcggcaataactttcttttaagggctcccttgcaggggtttaatcaattttcaataatggaaatgtcagatgacagtaccagtacaatctttaatattttgaaggaagatcctatcttttgtgaagctttggcgattgctaacctggaattatggatgaaaattaaaaaaggaaagttaaatactacacagagcgaagctattattaaatattatataagatacctttcacgttcaaccccatatggaatgtttgcaggtgttcggtgcggtaattttggggaggcgacaagctgcgaatcaggcagtgaggaagaagctgaaaaatattgccgcgtagatatggcttggttttatggagtcatccagactttagaaaaggattttgatgtagtgtataatacaaaagttaaatttaattcagaatgctttatacatggcgacagaattgtaaatccttataatcataattatggacagttagatcacagagaagggtattttaaaaattctaagattagatttacgggacaggttaaatttattagggataatacaagtgattggattccgtttgaaaagcttttttatgcttttgtaaagtataatttgaatgttcctaaagataaattaaagggctttttacttagtcttatagaaaatgggtttttaataactgatatacggggaggactgtcagagacagatccattacagaatttgctggatcagctaaaagactataaactaaatactcaaaacagtaattattatgagaaattattaaaagtcaatgaactaagactggaatatagtagtaaaccttacggaaaagggatagatttataccaaaacttgtgtgaaaaaatggaggaaatacataagagcacaaattatataaacgtgatttgtcaacacagcatagagaaaatctgtctgaatcaaaatataagacaagaattagagcgttttgcaaattttttgattatagtgtcgtcctcagataatgagccggcatacttaactagctacaaagaaaggtttcttgataaatatggagcaaatattgaagtgccgctcttagagctattcaacccggtagctggattaggaaatccttacgaaatacccctgcttaaaacgggaaacgaatataaaggaagtaaaaaaagagaattaatagagaaatacttcaaagataagattctgtattgcattaaaaatcagataagggagtgtgtagtggacgatgaggatatcaaataccttaagcatcttcaaatctcccataaagaaagtaaaataacatatgccagttcatttgaattaaatgccgccattttggcagagaacacggaacaaatcgatcaggataattataaaattattttaggccattgtattggggcaaaccgaataggaaagctgaccaaccgtttttataatgctttaagtgatgcatataaagaagagatagctttattttataaaaaagaaattgacaatgctaaatatttgtatgcagagtccatacatttgccgagagagggaagagtcaataatgtaagcggtggtaaaaaaaattataaatatcaattaaattataaccttgccccagagaaatatcagacggaaatatctcttcaggatttggttattggaattaataaagacaatgatagattttatataaaatctaaagcttacaataaaattatagctgctgtttccgacagtatgattacgcgcttggatgatgattgctacattaggtttctgcgggaggttacttatgcatatcatatagagccattagaaaatatttattatctgcaggctaacgaaagcaggtatatcccccagataagatacggcaatgttattatacagagagagtgctggaaattatatagagaagatatgagtacaatagaaaactatcatgattttacgattaagttttcttcgttcatgcacaaatggagactaccaagatgggtatacgtgggtatagatgataaatatctgatttttgatctgttcaatgatatatgcatgcaatgcctatactctgaaattaaaaaaagtctgcgttcagctgattgggtcattctggagtctgcagagagagaagcagagagcaatacttggttaacggataacagccaaaggatatttttttccgagataactgttgaatgtatcaaacagaacttgatgggcgcagaagggaccatggaaggctttaatgacaaacttaatttaccagataagaataagattctataccccggacaggagggatggtattattttaagatttatctggaggaaaatcagtgcaacgactttttgaggacacatttaagtgcttttgcaaaatatctgttagaaaaccaattaatagataagttcttttttatcagatattctgatccggattttcatatcagattccgaatacaagtttcaaagccatttgaaatcatacatatatttaatcaatggtttgacagagactgtatgaaaggattcagtattcgctatactattgatatctatgaaagggaatgtgaacgctacggaggagcagcgcttattcatgaggttgaagcctacttttatcaagacagcttattagtgttacatattttacaatcaaaagatgagtgtgacgaaatatccgaggattacattgcagtatccgcaatcattaatattgccaaacatattattaaaaatatggagagggcagagctatatttaaataagctgattaatccggacttattccgaagtgaattccaaaaaaacagagcggaatatatggggattctggaaaacaagggaaggctcccccttttccttcagcaagcaatgtgcaaagtggaagagagtttggatcattattttataaagatgaatcaaatatctgaaagtaaccatcttaaaaacgatagctgggacatttttttatccttatgccatatgttttgtaacaggatcagcggtgacagaaattgggaaacaaaggttttgtcaattgcacgacatacgttacatgcttggaatgaaaaacaaaagtattttgtttcagcagggaaaatagaatgaatgatgaaactaaaattaaagatattgttattaacctaaaaaaatgtttttatcttattttaaggtatagcagattatatatgtgtgtgacgttgtgcttttcaattttacagggcatatttccagctttatctttagtagttatgcagaaaatcttgaataagctgcagtccggtgacagaggtcttttgccttttatttacctgataatattatatacattaatagatatggcttcctccctgctctcagcaatttataattactattatacgaagtttctttctcactttaataagtacatagaattgttaagactgaaaaagggtgttgatctatcattaaaagattatgagaatgcggaaatatatgacgttataaacagggctcagcaacaaaatgggcaaactgttttaagcttttttggacagtttacttctattctgcaattggttattaccatatgttcgtcgcttattatcctggctaattttaggacaggatggattgtcatactcataatactgatattcccatttttgaagtatttatttacgttaaaaatagcaaaaatgcaatatgatatgagatccagaagaacaaaggatgaaagaaatatttggtatattgattatctgataatgactggcgtagcattcaaagaaataagaatatttggactgaaagaatattttataaaaaagtacactgcattaatggacaggattatccagcaggatgtaaacttggcaaaaaaatcaatttttgtacagacaggattgcttctgtgcgatcaaatagcagcaggaggtgcatttttatacctggttttttgcggaattaagcaaattattttgatcggggatgttgttacatacacgaaatgtatattctcaattaaaaataacctggaaagtattttcgaatactttagctctatagcgaatgaagctttactgattggttggctttttgactttttagagttaaaaactgcagtccctttagaggattcttctgtcaaaatttctgggatagacagcattcagattattcatttatcttataaatataaaggttcatctgaatattcgttacgggacattagctttacaatcaaaaagaatgaagtcttagggattgtgggaaaaaacggatcgggtaagtctacacttatcaagataatattaggattatatgacgactatgaaggtgatattttagttaataatattaacttgaaaacaattaataaagaatcatattatgagtctgtcagctgcgtatttcaggattatatgaaatatgaggcatccttaaaagataatataggttacggggatctggagcacatagataatactatacaaattgagaatatattaaaatatgttaaattaaaagaaaacatatggcaggacgatggagttgatgtgcttttaggaaattggtttggaaagaaacaactttcaattggagaatggcagagagtagcaattggaagaggaatctttaagaagagtgaactgtgtatcatggatgaacctgatgcgtctattgatgcagaggcagaacgacaattaatacaaatgtataaaaaagtttttagccataagataggaatttacgtcacacataaaatcaaccatgtccgctatcttaccgatcaaatattagtgctggataatggaaatgtgtcggagtttggaacacataccgaactgatgaaacataaggggatctattataaactctttaaattacaggaagaaagcagataggagggggatagcttattgatataaaagatagagtaaaagtgttggttatagaggctttaaataaattagaagatgaaattgcagagtatgagtatgagcctgaaggctgcacaggtactttggtgtttctgggtgaagtatacccatatctggataataaagaaaaatgtatggaattttcttatcttattatgaatgcattaaaaaaggagattcaggaaaaaggaggaactttttcaggattgggagccttcggagggctgacagaaatcctctttgcagctaaaatattttacaaaaagacaggggcatatggaaaattccttcaaacattagagttaattgtctgccaggaggccataggctataccgcttgctgtaaagaggagatagaagagctgaaggtgattcattatgatttgattaatggtttgactggtatagctatgtattatttatgggataggaaattaagtgaacctgaaaattttctcctcaaagaaatcctgaattattttgtcacaatatgctgtgcagaaaaaacttcagtgccaggttggcatataaaaacaggaaaccaatatcggatacaagacgtagaggagtatccccatggaagcatagattttggattagctcatggcatgatgggaccattaatggttatggcagaggcttacagtaaaaaaatagtggtagagggtcagagggaagctatttgtaagctcgtagatttgtatatgatattcaagaaggatataaatggtgtatttcattggccatcacagctggactttacagacttccagcgattggaatggaatacggataaaagaaataatagggtgagctggtgctatggaaatattggaataagcagagctctctatctagtaggaaaaaatatatcggatggagctttaatggagtttgcctataaaaatataataggcattgctaatctcgatattaatacctataaacttgaatctgcaatattatgtcatgggtatggggggcttttatccattcttaatgttgtgaacagagagaactacaataatttactgtatgagaaagaaattttattaagtgacattattattaatagtataaccagccaacctgatgttaaaagaaaggaagcttttcataattttttgtatagcagaaccggggagcttttatcattaatatctttatttgcgcaggaaacggaatgggagaggtggttgtaccttgtataataatagatggataaataaagagagaataaacggcactatagtaaaagaccatttaatgcttgaacaggtaatagaaatattggacgcttacttttgtaagcttgataaggatataaatgatggtaatatagatgattgtatattatctgactatattcttgttatgagcgaagggatggagctgtttagagaaaaagaaagaggacttgacaatatatttcttgcagtaaacagaataaaaaaaggatttgagcaaaagggtattccccagactgtcggactgtatggcgggggaatttctgatttcggatatagtttaaatgtcatgagtttagctactgatacatttaagaaattcacaaatacctacaatgatatagcttatgaaagtataagtgacttctgtgactttgttttggcagagatatatacgataaaggagtcttattacgatgtgatcagcggtttggcaggcagtatgatttatttggtgaaatgtccggaaaataaaaagagaaattttactattataaaagtaagcagttgtttagaatcgattatcaccggtgtgcatccgtttggcaatgctatgattgagaattggtttatatccaatgataatatttatgatgaagagctgcggatgagatatcccagaggattatttaattttagtgtatctcatggattaattggtcctatatttgcactggctaaagcatcagatatagtaatgccgaaatatgtatccttaaaagttgtggaaaatgcacttgaaacatacagagaatacagccgcaggaatgaggacggcgttacagtttggccgggacagttagactttgacagctacacggctaaaagaacagatggttctaataaacggcagagttggtgctatggctctataggaataacgggagctctctatacaatctctaaatacataaatgataaatcgttacaggaatttgcctgtctaaacagcgaacgtattgccggatgccccattgatgagtatgagctggaatctccaataatttgtcatggatatgcaggcatgcttctcattttagtaaagatttatcgtgataagaatagtgacctgatatacatgcaaattatcaggatagtaaaaaaaatgatggaattgtataatcccggattaggatatggattcagagatgttcgctacgatatcattgaaaatatagtacaaaagtcatttgttgatgacaatagttttttggaaggaagtttgggaattgtaatagctctgttaagtttagtgaaatgtaatgtttattcatgggacagattattattaaattaatgtaaaaatatgcatatttcctgcagtgtacggggggacaataggaggaaagcatatgagtaaatatgatgaatttgatctggatattaaacgtgataaaaaagatgtaggaaaagcatcaagtaccgccgggcaaaatgcagcggctaatgttccttcaccagcagttacacaagttagaacatgcacaaggtgtacctctagctatgtgggagttgcaagatgctaagctgatattgacaagtaaaagcagccaagagtaaataattaggttcctcctgtacactgcgttatattcgtggaggcgttctcgaaatgcgggcatttccgtatatgtgaacgcctcttatttatagccataaaagctagaaaaagtgttaaaaaataaacgataatataaatttaaacgaagaaaattctgtaaatccaacactgtgtgcagaatattgagcataagaatgatgaattttacaagagtgcaaaattggtaaagaaaatgtcgatatcagggatatattttaaactcatttcttgagataatataaacatattaaagctttataaaaacttaataaaggatatcttaaaagctaaggaggttctaattgcaatgaaagtaggatgtgtgagagaaatcaagaacaatgagttccgcgtaggtatgactccggacaatgtaaagagctatgtaaatgccggacatgaggtgtatatcgaaaaggatgccggcgtaggatctggtttcatgacggatgagtatgttgcggcgggagcagtgattcttgacacagcaaaagaggtttgggacaccgttgaaatgatgattaaggtgaaagagcccctgaaagaagaataccagtacttccacaaagatttaatcctttatacctatctgcatctggctgctgacagagagctgatggatgctatgcttgaggcgggagtaaaaggtgttgcttatgagacattgattgaacgggacagaagtattccgctgctggcacctatgagccagatcgcaggaagactgagtatccaggaaggtgcgaaatacctggaaaaaccctttggaggatctggtgtgctgcttgccggcgttcccggaacacctaaggcaaatgtagtaatcctgggtgctggtaccgtgggaaccaatgcatgcaaagtggcagtaggaatgggagccaatgttacaattattgacatcagtctttccagacttgcatatttagatgatatcttcggcgcgagaattcagacgttgatgagcacagacgccaatattgagaatgcagttgcacaggcagatttggtaatcggttctgtgttgattccaggaaaagcagcgcctaagctgatgaaaaaagcttatcttaaaaatatgcgtcccggcagcgtagtagtggacgtggctgtggatcagggcggatgctgtgagacaacaaaggttacatatcacgatgatcctacctttgtagtggatggtgtggttcattactgcgttggcaatatgcctggggcggttccaagaacatctaccattgcactgacaaatgccacactgaaatatggtctccagattgcaggaagcggactggaagaagcctgcaggaaaaatgatgtattgtattctgcaattaacacctatgagggtgagattacctgtaagaatgtggctgacagctttggacttccccacaaggaggcgaaagaattagttggttaaactaaaatgaaggaggtagtatatggatacttttgtaagaatagttactaagattaatgatttagtttggagtttgcctctggtacttttatgtctgggtgccggtattttctttacgattatgctgaagggatgccagttccgtttgataaaagacatgttcaggctcatacgttcaaagtctgaggctgagaagggcgagggcggtatctccgcattccagtcatttgcaacaaccgttggttcccgtgtaggaatgggaaatattgcaggtgttgcaacggccctttattttggcggtcctggtgccattttctggatgtggttaatcgctctcattggagccagttcatcctttgcagagtgtacattggcacaggcttataaagataaaaccggcaatgagtacataggtggtgcccagttatttattacaaagggactgaaatcaaaatccattgctaaagttatggcagttttattcgccattgcagctgtactcgggcctggtactttaatgcctggtctgcagatttatcagattgcttctacattccagagtgcttttggcacacctcagatggtcattggtattatcagtacgatttgtattgctcttgtagtttggggaggaatcaaacgtatagggcgggtggctgagttattagctcctgttatgtgtgtgatttaccttatcatggctatcgtgattattggaatgaatataacagtacttccctctgttcttgcaacaattgttaaatcagcatttggtgcagatcaggcgtttgcaggtatcattggtgccgctgtttccaatggtgtaaaacgtggtgtgtattctaatgaagcaggtcagggatccggagcaattgtatccgcggcagctgagtgttctcatcctgcaaaacagggcttgatccaggcgttatccgtatatattgatacgattgttgtatgtacagcatctaccatgatcatcatggttacaggtaactacaatatcgtggataaagcaggtaactttattgtaaataatacaatgagtgaaaaaggtgcactttgggcccaggatgcagtgaatcaatcattaggcggctggggcggaaagcttctggcaattatgattgctttgtttgtattcaccagtcttatgggttactattatcaggcagaaagtaatatgcgtttcctgtttaaagaaaagccggcaggtacttatctgatgcgtggtatcttcctggtagcagtgttctctggcgttattgtagatgggcagacaatctggagcatggctgatttaggtgttggtttaatggcttgggttaacatcataggtgtcttgatactctcgtcgaaggtaaaagcaatcctaaaagattatgaacagcagaagaaggcagggcttgatccgctctttgatcctgcaaaatttggaattaaagatgaatcaggagcctgggataaatatgcaggcttactgaaaaagagagaagcagaatcaggtaaataaacaaagaaaatggaggaaattatatgttaaaatttacaaaacaatctgaccctgaaattgcagcactggttggtgaggaattaaaccgccaggaacacaacattgagatgatcgcttctgagagtactgctcccttggaagtaatggagttaagcggcagcgtatttaccaacaaaactctggaaggatatccgggaagaagatttcaggctggatctgaagttgcagataaagtagagaggcttgcatgggaaagagcaaaagaactgttcggcgctgagcatgtaaatatccagtcctattccggttcaaccgcaaactacagcgtatttgcatccgtattaaatcctggagataagattctggctatgcgtcttgaccagggcggacatctgactcacggttcaccggcaaactgggttagcaagatttataaccatgtattctatggggtagataaagagacagagagaatcgattatgatgcacttgacaaactggcaaaagaggaaaagccgaaaatgattattgccggtgcgagctcctatccccgtctcattgattatgaaagaattgctaaaacagcagaagaagtaggcgcatactttatggtagatatggctcatattgcaggtctggtagctgcaaaggtgattccgagtcctattccttatgcagactttgttacttcttctacaacaaagactttctgcagcgcaagaagcggtatggtattctgtaaagaaaaatatgcaaagattttggataaaggtacattccccggaagtttaggatccctgatgttccatacaatggctgccaagacatggtccttcaagtatgcagcttcccaggaattccatgatattatgcagcaggtagttgtaaatgcccagaagctggcagaagagcttgctggctatggattccgtattgtgagcggcggcacagacaaccatcttttagttgttgatttaagaggaaaaggaatcacaggtactgttttccaggatgcgctggatgcagtgggaattactgtaaataaaaatatgattccatttgatccggagaaaccgtcagtgacaagcggtgtgcgtattggccttacatccgtgacacagagaggattaaaagagcctgaaatcgtagaaatcgccagcattatgaaccaggttgccgaggcacctacagatgaagccaacctggcagcatgcaaggaaagggcagaggctcttatctccaaattccctctgtatcctgcaggagcatttgaagactgatttgaatccccatataaagcacctccgttgtaccggtaattgcccaggcagttacaaaggttaatgtgcgaggacatgagcgccgcagcaaggtgatattcccctgttgtggcgcttgtgctttttgtggaaggcggctggaaggaggtgtggccatgaagattcagaaaacggactgggggtatatagaatggattcaaaggtctgagaaccagccctctatgaatatcggaaaagttgtctgctatccgggaaagcagatgtaccctcacattcattatgaagaacagtttatctatgtgctggaaggatgcgggaccggatgggcaaacggatccctgcagaggattcaacccggcgccatgtattatatggagtgcgggtgcgagcactccatgaaaaatgagggagacggccctattatccaccttttggtttccaacccggtgcaggtggaaatggacagctttattgacaaagaggaaacctacaaagagctaagcagcgaggatctcattgtggccattgaggcggtgaggggacagtttttggacaatctccactcagcatacgtgatatttacagagcgtgggaatctgctatatcagggcagttattttcccacatactgcaggagaacatgcagcccccaggaacacccgggagagtgccggtgtatgaagaactggatgcattttctggagacgacagaacaaaccatagaatgtccctatggcctgttggtatacagaatccctatcttttttaataaaagagtggtaggatatatactgggcggatacatcaggatatcatcggaggaagaagagcccattgaaggcgtttatgataccccggaaagtaccgcggagggactgaaaagccttctgaggaaagcttccagagcgatccggaccttctgtgaatttaaccagtacagaaaggcactgtttgaaaaagaggcacttctggaggacagcaaaaattccagggaggcacttctgcatgacctgaagatggcagagaatacggtaacggacctgaaaattaatcaccattttctgtttaataccctgaaccagatggcatccctggcgctggaggggggaggagtccccctgtatgaatccattatccatctggccagaatgtttcactattcgtctcagacacagggaaacctggtatccttaagacatgagctgaagtatgtggactcctatctgcagcttcagaagtttcgatataaagatgctttggatttccgctacgatatagatgatgaggcgcaggatactattgtgccgtttaatttccttcagcctttggtcgagaatgcttttgtccatggctgcgaggcggaggaaagaaaatatctggagatagaaatcaaagccaggaaggaatatgttgacatatgggtaaagaaccggggaaaatgtctgacttcccaggactgttatcggattaatgtggggatgagaggaaatacagtccatggactgggaatgatataccataagctggggtctatctataagggcggatttactatgaaaataggcaccagggagaattctacggttatgtttgtcagattaccaaaataatttaagaaaaagaggcagatacaaatgaaggacaaagagcagcagcacagaagagtatgcgcgtatgtagatctggatgccattgtgtggaatctggaacagatacatgccaatatagcagagcaaacccaggtggttgcagtggtcaaggcggacgggtacggccatggggcggttcctattgcccgtaaagtggaacatttaccttatatctggggatttgcctgcgctacggtggaggagggagtaagcctccgcgaggcgggaatccagaagcctgtattgattctgggatatacttttgaagaacattatgatattatgtgtagaatggacattattcctgtggtatttgagacggatatggcaaagaagatgtcagatactgcggtaaagcttgggaaaaggatggagattcacctggcagtggataccggtatgggaagaatcggcttccgggatgatgaatcttctattcctgactgtgtagagatctcaaaaatgcccggactgctcatatctgggctatttactcactttgcgagggcagatgagtgggacagcgcgccggccaaaagacagatggagcggtatctgcactttgtaaggcttttggaatcggcaggcatccggattccttataaacactgctctaacagtgcagggattatgaatctgccggaggctaatatggatttggtgcgggcgggaattatactgtacggtctgtttccctccgatcaggtgtatacagataaaatcaagctgaaaccggcgatgtcactgaaaagtcatgtggtttatgtaaaggatatagatccgggtaccccagtcagctatggaggaacctatgtggccgaagaacccagacgggttgctaccataccggtggggtatggagatggatatccccgatctctttctaacaagggatatgtactgatccatggaaagagggctgacattataggaagagtgtgtatggatcagtttatggtggatgtcacagatattccagaggttaagacaggggatgaggttaccctgataggcactgacgggggagaaaccattacaatagaaaatatgggggatataagcggcagatttaattatgagtttgcctgcgacttgggaaaacgaatccccagagtatacttataagaagggacggaagcgtgtgattagagcggttatctgcgatgatgaggcagcaacagtaaatattatccggtattatatagaatccaagaattttcctctggagatcattggaacggcggaaaatggcagggacgcattggctttgattcagaaaactaagcccaatctggtctttatggatatccatatgccgtatatggacggattccaggtaatacagagtatagaaaactgtaaggtgattatcgtgacagcgtatgattcctttgagtatgcccagaaggctctcagggcgggagtctgcgacatcattgcgaaaccgattgactttgaacagctggaacaggccatctaccgggcgattgggtggagagtgacacccaatgagagtgtaaatgcgatcatagaatttattaattctcactataaggaaaagattgagctggcccagctggcgcagctgaccttcagtacccagagctacattacgagactgtttaaaaagcacatgaatatgacaattatttcgtacgtgcacatggtgagagtggaaaaatcaatagaattggtggaaagtaagaagatgagtctgcaggaggctgcggaggaagtgggttacgggaatctgaaaaattattataagtattttaagctgtacaaagggcagacacccgcagcctatttccgggagttaaataataaggggtttgaaaagtaatagaaaaagggtacgggcagaagcgccactcccgcgcttctgcccgtacccttttcctgtaattcccctgttttgcggaaaaagaatatgatataatgagcgatagcgggccatggggagctttgctcacctttggcgagcggcgaatggcgatcatgccgaaggcatgatataatggacaagatctaaaatacaaggaggacatgtatgaaatttatttcttggaatgtgaacgggctcagagcctgtgtacagaaaggttttacagaattttttgacgggatagatgctgactttgtttgtgttcaggagacaaagcttcaggaaggacagatcgatttgtctttggaaggatatgagcagtactggaattatgctgttaagaaaggatattccggaaccgcagtctttacccggcataccccgctaggggtcagctatggaattggaatcggggagcatgatcaggagggcagagtgattactctggaatatgagaacttttacctggtaacggtatatacccccaattcccagagtgagctggcacgcctggaataccgaatgaagtgggaggacgatttccgtgcatacctggcagagctggatcagaagaagcctgtagtaatgtgcggagatctgaacgttgcccacagggagatcgatctgaaaaatcctaagacaaacagaaggaatgcgggatttacagatgaggagaggaataaatttacagaactgctggaggcaggttttacagacacattccgctacttctatccggaggcagaggggatttattcctggtggtcctaccggttccgggcgagggagaaaaatgcaggttggaggattgattatttctgcgtgtcaaaacggcttgaagaaaagctggtctccgcggcaatccatacagaggttttcggatctgaccactgtcctgtggaagtgcagatagacttgtaaatggattgtattgagggacaagatctgatagaatagaaccattgagatgagaaaggaggagccccatgaacggaaaaaaggatgtaagacttacgcagatgacaaaaacagcagggtgagcggccaagataggtcctgagacccttgcccaagttttgggcaagctgccgaagttttacgatgagaagctgctggtgggggtggaaacctccgatgatgcggcagtgtatcagattacagatgagattgcaatgatacagacagtagatttttttacgcctgtagctgacgatccttttacttttggccagattgcggcggccaattccctgagtgatgcttatgctatgggaggtgaacccaagattgcacttaatattgtaggatttcccaattgtctggatccggagattttgggagaaatcctggccggcggagcttctaaagtgcaggaggcccaagctgtgctggtgggcggccactcgattcaggatgacgagccgaaatatggcctgtgtgtgacaggatttgtacatcctggtaaactgtggaagaattatggagcaatgccaggtgatgtgctgatcctgacgaagcctgtgggaagcggtattatcaacactgccgtaaaagccgggatggcttccggtgaggcaaaacaggcagtgatcaaagtgatgaccgcacttaacaaaacggcgaaggaggttctggaacgatatccggtacatagctgtacagatattaccggattcggactggggggccattgcctggagatggcaaaagcaagcgaagttacattggaaattcatacccggaagattcctctgatcccggaggcagatgcttatgcacgcatggggctggtgcctgcgggggcttatcagaacagaagctatgcaaaaaacgatgtgatgctggcagaattgccggaatatctgaccgatcttgtctttgatccccagacttcagggggacttctggcatctgtggaggagaagtatgcggaggatatcctgcatggatttgcacagcagggacttgccggacaggccgctgtgattggaagggtactgcagaaggataaaaagtatcttcatttgttatgacatgagggaaccggacagctccaaaaggggtgtccggttttttaggaagtgagaaaaaatgtatggataaaggtaaatatttccgaagaatacctaaagtagatattctgttggaagaggcaaagaaggaaggacttttgactaagtatgacagagatctggtggtggctgggattcgccaggtaacggatgagctgcggagcttcctcggaggatgcgaacaggaacaagccgcagaaagaagactggatacggttatggaattgctgaaagagaggcttgaggagcaggacagatgccgggttcaaagagtgatcaatggaacaggaacactccttcacacgaatctgggaagatcccctattggggaaaagcatgcagagtacctgaggcatgtagtcaccggatactcaaacctggaatatgacctggatactgggggacggggagagcggtacagccattttgaggacctcgtatgtcagattaccgggggagaggcggctgtggcggtgaacaacaacgcggcagcagtactgttgatactaagcgctctggtaaaaggaaaggaagccattgtttccaggggagagctggtagaaatcggcggcaaattcagaatacccgaggtcatggagcaaagcggaggaattctcagagaggttggaaccaccaataaaacccgtctggaagattacagagcggttataggagagaacacaggggcgattctgaaggttcataccagcaattaccgaattaccgggtttacggagagtgtggggattgaggaactggcaggacttggcgccaaatttggggtgcctgtgattgaggatttgggaagcggcgtaatggtggacttgagagcttatgggctttcccacgagcccatggttcaggaatctataaggcgcggcgccgatattgtctgcttcagcggtgataaactgctgggaggaccacaggcggggattattacaggaaaaaaagagtatattgataagatgaagagacatcctctgatgagagcgatgcggatagacaagtttacagtgactgtgctggaacagattttcagggaataccgtactccctcgaggctggatcagaatcttccggtctttgcaatgttgtcccagagcgtggagcagctgaaagagaaggctgtccggctggcagattctctgcacatacatgagaaggatgctgtgatacaggtggagccctgtgcttcccaggtgggaggcggagcgctgcctggagaggttattgagagtttcggggttacggtacaggggaaaaccataacctgtgaggaactggaggaaaggctgagaaaagggaatccgcctgttatctgccgtgtggagaaagacaggatttggcttgatatgagaaccatccaggaggaggagattccccaggcggctgaaaggatgaataaaatatttggagacactcacttatgaaaaatataattatagggactgccggacatattgatcatggaaagaccactctgatccgtgcactgacagggcgggaaacggatcgtctgaaggaagaaaaaaagcggggaattaccattgatttgggcttcacatacttcgatctgccagatggaagccgggcaggtatcattgatgtccccggccatgaaaagtttgtccataatatggtggcaggggtggcagggatggacatggtccttctggtcattgcagctgacgagggaattatgccccagacaagagaacatctggatattctggaacagctgggagttgagaactatattatcgttctgaataaatgtgacttggtggatcctgaccggatggaagaaatgaaaagaggaatcctggaaggactgtctgattccagagccgccagtgcgcccatggtggaagtatcggcggccacaggttacggaatccaggagctggtccatgtgatccaaaagacagcagtcctgcttccggagagagacagagacacaattttcaggctccccgcggaccgtgtgttttctgtggctggcttcggaaccgtggtgacaggaacggttctgtcaggagcgctcagcagaggagaacaggtggaattatttcccagggggacggtatgccgggtcagaagtattcaggtgcatggacaggactgccaaagctgcagtgcagggcaaagggctgccattaatctttcaaatgtaaagagagaggaggttgccaggggggacgtcctggcggcctgcgggagcatgaagaaaaccatgatgctggatgtgcgtctgcatatgctgccttcctcctcaagagttttgaaaaatagagccagggtacatctatttacgggaaccagccaggttctctgccgtgccgtgctgttagagacagaggaactgaagccgggagagtctgcattggcggaacttcggctggaagaggaagtagcggtgagaaaggaggaccggtttatcatccgtttctattcccctgtggaaactatagggggcggcattgtcattgaggcaaaccccagaaaaaagaagaggtttgaagaaaagggacttgaggagcttagaggaagggagcatggctctctgtctcatatattggaacttcaggtgaaaagccattgggatacaggaattactcttcaggagcttgcacagatagccggagtatcagaggaggaggcagaagaggggatttgcgttctggaaaaacagggcagtatccttcgatttcctatgaaaaatcaggtttatttgtggcacagaagctatgcacaagagctgttggagagagtacgagataatttgcgggaatttcatgagaagaatccttacaaaccaggggtgaataaatctcagataaaaatgaatacggctgcggcacaaaaagcgggagtgtttgacttatttattgagagaatggaaggggagaagcagctggcgagagacagagagttcctgcgcctttatgagtttcagattgaaaaggattccaggtatcagagagtcagaagaaaaatggaacgtgtttttctgaaggcacagtttgaccttgtacggttctctgagattgtttttacggagacagatcctgaggtcatcgcagatgttctggctcaggaaatggcggaagggcgcattgtaaaggtggcagagaatctgtatactttgtccggaatcatggagaaggcaaaggcggcaattcttgaaaagctggacagagacggctctgtgaccatagcagaagtcagggaccttttgaataccagccggaaaagtgctaagcctatcctggaatatatggacgtacttcacattacaagaaaagaaggcagggaaagcgaaagggtggcttactgatgaatctgatacaactggaggcttttatccgggtagctgacagtggcagcttttcccaggcggcaagagagctttttcttacacagcctactgtcagttcccacatctcaggtttggaaaaggaactgaatgccagactttttgtcagaacgacaaaaagtgtttctttgacggatcagggaaggattctttaccggtatgcttataagatattggagctggagaagaaaatactgcaggagttttctaccgttgaagaagagagtaattccctgactatagcagcgtctacaatcccgtctcagtatatactgccccgggtagtgccggcattcagcgtcaaatatccccaggttcagttttctcttctggagaatgacagcgagggtgttgttaaaaagattcttggagatgaggctgagatagggatcacgggaacaaggcttcccgggtatccctgtcactatcagatgctgtgccgggacaggctagttatcattacaccggatacggaaaagttccgggaatggaaggaaaagagtttttctctggaagagctgatgagagagcctgtgattatgagagaagagggatccggaaccaggaaggaagctgagaactatctggtatcccaggggatccctctatctgaaatcaaagtcatcgcaagtatcagcaatcaggagaccattaaacagtctgtgcgaaacggacttggaatttctattatttccagttgggcagcccgggaggatgtacaggaggggcgtattttggaattcagtcccagagaagagatgtatcgggaactttacctggtgcgcaggaagggacgcaatctgcccaaaagcgccagggcgttctgggactttatcagagatttttttcaaagtaaaagtgtatagagatatttattgataaaatctataagtgcaggagccttatagattttattgattttacaataattttgtttattgatatagttatggatagaaaatattgtcaaatatagtaagggcagggaaggaactgtaaaattatgatatatctggacaatgcagcaaccactcttattaagccggattgtgttattgaagctgtctgcggtgctatgagccacatggggaattccggcagaggcagccacggcgcgtccctggacgctgccaggacaatctatgaagcgcgggaggctgcagcccgcttttttggatttgaagatcccacccgcgtggtgtttacttccaatataacagagagtcttaacacagtgataggggggctcttcaaggccggcgatcatatcatcaccacagcgcttgagcacaattctgttctcaggcctttataccttctggaagagcagggactggatctaaccattgtgccggctggaaaagacggcactatctgctgtggggatattgagagggcggtacgccctgagacaagggcagtcatatgtacgcacgcctctaatcttacgggaaaccttgtggatatccaaggtgtgggggacatctgcaggaaccatgagattctgtttattctggattcggcccagacagcgggggttttccccattcatatgggaaaaatgaagattgatattctctgttttaccggacataaggggctgtacggtccccagggtacagggggaatctgtatccgtgaggggatagagatacatccactgaaagtagggggaagcggagtacatacttatgacagaaggcatccgtctgtgatgcctgcggcactggaagcgggaaccttaaacggccatggaattgccgggctgcttgcggccatacgctggctggaagagactgggatagacaatatccgcagaaaggaagatgctctgatgcggcggttttatgagggggtatgtaccataccaggtattaaaatatatggcgattttacgcagaaagatcgggcggcaattgtagctttgaatctgggggactatgattccggggaagtgagtgacgagctttcctgccattacggaatctccaccagaccgggggcccattgcgcgcctttgatgcatcaggccctgggaaccgtggaacagggagcagtcaggttttctttttcttattttaatacagaggaagaaacagacagagctgtggaggcggtcagggagctggcgtgctagatgaagacggggattcccgattcatatatatattactttttggaggagaaagaaaatgaatgtatgcagctcaaaaaaaacactactgctctcaggcgtgattctgggagtgatcgcagcgctgctggcctattttggaaaccctaaaaatatggctatctgtgtggcctgctttatcagggacagcgccggagctatgaaacttcaccaggcgcctattgtccaatacttcagacctgagattgtgggatttgcaggaggctcttttctgattgccatagccactaaggaataccgttctacagcaggatcttcccctatgatacgctttttgctaggggttattatgatgattggttctctggtgtttttaggatgtcctcttcgtatggtactgcgtatggcggctggcgatcttaatgcctatgtagccctggtgggattcgtccttggggtggcaaccggcagtctggcgctgaagaagggctttagtctgggaagagcctatgaaacaaaggcggcaagcggtgcagttttacctgttgttctgggggttctgcttattctcagtgttaccacttcattatttgcagccagcacagagggtcctggaagtatgcatgcgccaatattagtatcgcttttcggggcgctgcttttcggggctgtggcccagaagagcagggcatgttttgcaggcagtatccgggatattgttcttatgaagaactttgatttacttacaattatcggcggactttttgctgtcatgcttctgtacaatgcagtcacaggaaattttgcgctttcatttaccggacagccggttgcacattccatgcatgtctggaaccttcttgggatgtatgttgtgggcttcgctgcagttctggccggtggatgtcctctcaggcagctgattttggcgggccagggttcttcggattctgctgttacgtttctggggatgcttgtgggggctgccgtctgccacaacttcaacctggcgggagcagcggcaaaggcggctacagagactgaggcagcggtggccggaggcccggcacttcccggcaaggttgctgtcattggctgtatcgctgtactgctgcttttgggattctgcagaagagaaaaacaggaatgagaagtcttagaatagaaaagaggtattgttatgatagaagtagacgcaagagggctatcctgtccggagcctttgatgatgacccaggcagccctgaaaaaatgcaagggtgagtctgttaaagtgctggtaagcgaggcgcacgccaggagcaatgtggaaaaatacggaaaggcccagggaaaagaggtaacagtcacttctgtggggaatgattttgagattgtgctggaatagcattcaggtttattctacaatttcccgggtataatccacctttcgtttttcctttgagatacccccggccatatgctctaccggctgcctcaggaatgaggcacgcatcacggcatcagttccgaacttttttcgtatctcatccactgcctggtccattttctccagcttttcataatccgtatgatcaaacagggagatctgtcttgcggcatcatctttggaaagttttccggtatgaatgcctagatggcggataggggtgccgtcccacagctcatcgaacagccggcaggcagcctgatgtatttctgcggtaatgttggtggaagaggggagcatcatttgatgagatactgtattcaattcaaaatctttaattgctacagacaccaactctgcccggatgctgtctctccgaagtctggcagaaactgtctccgccagagagaggagaatcatccgggctgtacctccgtctgtaacatcaaaggctatggtagtgctgttgccatagcctttattatcttcagggactgcctccaccacagacatatcccttccattggcaaaattccagatgacttccccatattttttcagatgatgcctcagaacatcaggatctgtattggccagctctcctatggtgtagatgcccagagtatttaacttcctttcagtagccctgccgatagaaaacatttcctttaccggaaggggccacatcttttgggaaatatgttccggaaagagggtgtgaaccaaatcaggcttcttaaaatcagatgccatcttagccagcaatttattggaggaaactccgatattcacagtaaatcccagttcctcccgtatacggtcttttaacgtatgggcaaatactgttaaatctcccagaagtccttccatccctgtcatatccatgaaggcttcgtcaatgctgtactgttccactgccggagagtattctttcagaatatccaaaaaggctttggagcattttttatatagttcatagtgaggcggcaccagtttcagatttggacacttcttaagggcattcaccacaggttcgcctgtttttacaccgtatgctttcgcgggaatggatttggccagtatgatcccccggcgttttgccatatccccccctacggcagcaggaatggtccgcaggtccagcgttccttccaggttgcgcagcctgtatactgcctcccaggacagaaacgcgctgttaacatcaatatgataaataactgtcttcactcataccacctctgttttactcgttcgctcccggaaggggattcttttattggttcacataccatcccacaggtcccggattcagattcatgtgaatctgttttacctcctgatactcttccagaccgtagattcccagctcacgccctgtaccgctcatcttatagccgccccagggtgtctgattataccccagattataacagttgatccatgtaatgccggcccgtatctctttaatgaccctcattgcttttgcactgtcggaagtgaatacggcacctgccagtccgtaacaggtatcattcgccatggcgactgcctctttttcagaagagaaggactgtaccgtggctacaggaccaaagatctcttcccgtacgatacgcatatcaggggaacactgatcaaagatagtgggaaggacaaaatacccatctgcgcattccccgtcggtataccgctctcccccgcataccacccttgcaccctcatctcttcctattttaatgtattccagaacgcgctccatatgttcttttgtcacaagaggccccatatccggatccttcatgggatcacctaaagttagagcctttgtcttttttacaaacttttccataaattcatctttcacggattcctccacaaagattctggagccggaagaacatacctccccctgattataaaagattcccatcatagcccactctacggcgccgtcaatgtcagcgtcagcaaagataacattgggagacttgccccccagttcgaaccccagctttttcatattcccggctgccagcttctgaaggctctgtcctacttttgtacttcctgtaaaggtaagcatatccacgtccatactttccccaagctcacatcctattgcggatccgcccagcaccagattggccgtccctttcggcagtcctgcctcctccagcagttcaaagaggcggatggtagtcagaggggtcttgtggctgggcttaaacacaacagtattccccgcggcaagtgcgggggccagcttccaggcggccatggtaaagggataattccatggggtgatctgtgcacagacgcctacgggctcatggacagtgatggagtgaatctctccggatccgttgctgacactgcagattcctccctggggagcctggataaggccggcatagtaccggaaggttccggcgccgtctgcgatatcaatcagggactctctcaggggcttccccatgttctgtgtctccatggcagccatttcttcctggttttcctctatgagatctgcaaccttaagcagaactctgcttcttgcctccacatccatatcccgccattcacgggtgatgtaaaacgcgcttttagcggctttaatggcttccctgacatcttcaagactgctttcccaaatcctgcacagaatctctccgttaaacggattcactacatctgatgtggttcccggacttccctgggtccactggccgttaatatacatttttttagtttccataagaatagttctccttttttactaatattttctgttaaaaaaaccccgcttcgtatcttttattgtaacagaacatctgttccttgtaaatatgtattcataactagactgtattctagactaaagttcacttttttgccaaaatctattgtaattcgtatgtgtttctgctataatcttcaaagaaacaggggatagtacattccccggaacataatttggcgagggatttacgaggatgtaagtgaatagtgtctgagaagcgctatacactttttttcatatctaacaaaatacaaggagtgaaaagaaatgagcatgcaaacaattttgctaaaacagcacattggcgcaccgtgtgaaccagtggttgcggcaggagatcaggtgcgaagaggaacgctgatcgcaaagcctgcaggactgggagccaatatccatgcaagtgtgtccggaaaagtagctgccgtcacagagacagccattcagattgaagcggatgcagaacagccggatgactttgtatccattgaaggagaaacaaatcttgatctgattaaagccgcaggtctggtaggcatggggggcgcaggctttccaacggctgtcaagctgaatgtggatctgaaaggcggttatattcttgtgaatgccgcggaatgtgagccggttctggaacataatatgcagcaaatccggacaaaagctgacatgacagtacgtggcatcaagtacattatggagatctgtaacgcggatcacggtgtcattgcaattaaagcaaaacatgaaaaagaagtggcaattttaaatgaggcaataaagggtgatgataaattatccattcacctgcttcctgacttataccccatgggagaagagcgtgcggttgtccgggaagtccttggaaccttgttagacccaactcagcttccgtctgccgcagacgctgtagttattaatgttgagactgtgctcagagcggcggaagcgattgaactgcacagacctgcgattactaaaaatataacggtaattggcaagctgaagggtggtcctcaggcccatgtatttatggatgtccctgtgggaactactgttggtgagttgattgaacgcgcaggcggtatcgatggagagtatggagaaattattctgggcggaccttttaccggttccgcaactacactggatacgccaattactaagactacaggcggtattattgtgacacagccctttgaagatttgaagggcaggaaggttggacttcttgtgtgcgcctgcggcggcaatgaaaacagaatgcgtgacattgcggccaaaatgaacggagaagtaatctccgtgcagaaatgtaagcaggctgcagagattaagggtgcgctgaaatgcgaaaatcccggcaactgtccgggacaggctcagaaatgcatcaatttcaagaaggacggatgcgaagatattattatcggaaactgcagcgactgtaccaatacggttatgggatctgcgccgaagctgggtcttgccgtacatcatcagaccgaccatgtacttcagactgtgggcaaggaagtgatgcgtcatctcactacttcgaaaaagctggaagaagcacctgcagaagtttctgcacaggtgtctgccgatccccagaaggcagaagcggaaaagcccgctgtgaagtataccgctactgttaacgatggaattttaagaattcatattgaagagggaaaagacatcaatattgaatttccattccattgatatataaaaaagaaaaaggaggattatcattatgtctattacagccgaaactgcgcaagagcataagaatgacccggcagtcctttgctgccgtctcgaggccgggaatcagattcagccagctaacctggaagatcctgctatctttgatgacctggtagattccggactgttaaatttagatggatgcctgaagatttcccaggtgttaggcgctacgcttaccaaaacctgtgattcactctcaccgattaccgcggatgctgtggataagatacaggaagaagaggaagaagctcccgctttagaagctgcaccggaggaagccccgacacctgcgcctgctgtatcggtagccagccctgtgagcggcggaacactgaaaatccacatcggagagggaaaagaaatcaacattgaaatccccatgggttttagcgggggaaatggtgtggcggcggttcctgcggcagcatctgaagaaatgaaggatgccccagaagcagaagaacccgcaaaagtagtccgcagtgtaacaagaaagcattatgccatttctgaggtaaaaagaggccctgagactaagatcgacggaacggtcctttacatccgtgaggggatcgaggaggaagcggtagcttctcaggaactggtacatgaattaaagctggatattatcaccccagacaaatacaatacatattcagaaacgattatggatgtacagcccattgctgcaaaagaaggggaggatgagatcggaagcggtgtcacccgtgttctggacggtgtcattatgatggttaccggaacggatgataagggggtacagatcggagaattcggttcttcagagggtattctggaagaaaatattatgtggaaccgtcccggcgctccggataaaggcgaaatttttattaaaacagaagttaccattaaagagggcaccaatatggaacgtccaggtcctctggccgcacatgctgccacggatgtgatcacacaggaaatccgtgaggccctgaagaaattagaagacgacagccttgtggtgaatacggaaacctttgaacaggtacgccgtcccggcaaaaagaaggttgtcattgtaaaggaaattatgggacagggtgctatgcacgataatctgatccttccggttgagccggtgggcgttcttggtgcaaagccaaacgttgacctgggcaatgtacctgttgtggtatctcctgttgaggtactggatggatgtatccatgccttaacctgcatcgggcctgcttccaaggaaatgtcccgccattactggagagagcccttagtgctggaaacactgcacgatccggaagttgatttatgcggtgtcatcttggtgggaagcccgcagattaattctgaaaaattctatgtgtccaagcgtgtaggtatgacctgcgaggcaatggatgtagacggagcatttgttaccaccgaagggttcggcaacaatcacattgactttgccagccatattgaacagattggcatgagaggaatctctgtggtaggaatgtccttctgtgcaaaacagggcgcactggtagtgggaaataaatatatgaccaatatggtggacaataataagtcagaaggcggtattgaaaacgaagtgcttgcctgcaatactttatgccatgaagacgctatccgcgcactgaatatgttgaaggttcagatgaacggcggcaaagtaaaagcagccgaaaagcagtggaacccaaatgtaaaagccaataacgtagaattaatttctaatgtgacaggcaaacccattgaattggttcccaatgaaacatctcttcctatgagcaaaaaacgcaaagaaaaatacagctagaaggtatatgcatgaaatatgatgataagctaataactatggaaggtgtcatagtagaagtacatgacggctgcgtaggcattgatctgaagggccgtctgggatatatgaagattcccatgcgtatgctaattactgactatgagattaaggtgggtcaggaggtaggctttaagatgagctttgtagaacagctgggtcctgaacctaaccttaaatatatcagcaatcaacagacttatcaaaaaagacaggcagaaaaaaaggctgccaaagaaactggaaaggaggaaacaaagtgagtttaactgtagtagatggattacaatccgagatttatgtacccatcactccaccgccggtatgggctccagtgacaaaaccattaaaggatatgacagtggcaattgctactgctgccggagttcatcacaaagaagacaagcggtttaatctggctggagattttaccttccgtaaaatcttagatactatgccgtctgatgaactgatggtgtcccacggtggatatgacaacggagacgttaataaagacatcaactgtatgttccctattgaccgtcttcatgaactggctgctgacggagttatcggtaaagtggccccagtacacattggttttatgggaggaggcggcaaccaggaaaagtttaaaaacgaaactggtccggaaatcgcccgtattttaaaagatgagggtgtagatgctgtcatcctcaccgctggctgaggtacctgtcaccgctctgcagttttagtgcagagagccatcgaagccgcaggaattccgactgtgattattgctgcgcttccgcctgttgtgaaacagacaggcaccccaagagctgctgccccattggtaccaatgggagcaaatgctggagctcctaatgataaagaaatgcagtataatattgtaaaagaatctttagagctcttagaaaccctggaatcacctggtaaggtaattccattaaactacgagtatgtagcaaaggtttaagggatataaattagggacgtgttctttgtacaaagaacacgtccctaattgagttcagcctgtcccattttacgataggcctgtccctaaatggaggtattgcatggaagaagttatattacggcgccttgttatcaaggcgtttcatataaaccaggtcatatttggagaaaaaacccgaatggatccttcgggaacacttattattgcccgggattttttgccatccctgacggaatcggaacctttgattgaaaaaattgacatggaaattatttctcctgacgctcgtgaacgctggacgaatacaattatggatgttattcctgtctctgccaaggtgctgggaaaaatgggggaaggcattacccataccctcacgggtgtccgggtgcttctgaccggagtggacgcggatggtgttcagattgctgagtttggttcttcagaaggctgtttaaaggaacagatcttctacggccgccccggaacccctgataacaatgacattctaatttcttttaatgtaacactcgctcccaaagcaggggcatcccgtccggggcctacggctgcccaccgggcctgtgatgttttctgtcagatcctgagagatgagttgaaaaagatgaatggaaatttatgtacagagcgccatgagtattttgacaagtccaggccaggaaaaaaacgggtggttctgattaagcaggtagcaggacagggagctatgtatgatacctgtctttttccacgggaaccttctggttttaagggcggccgttctattattgatatgggaaatcttcctgtacttatcacgcccaatgaataccgtgacggtgccatccgggccatgtattagcaggaaaggagatgatttttattatgggaataggaccatccacaaaagagacaacgcttcaccacttccaggatcccctggtggatattctttccggggaagatgagtttgattttctgggaattattgttgtaggcactccgcaggacaatgaagataaattgtttgtaggtacaagagcagcagtctgggccgaggctatgcgggcggacggagcaatcatttccgcagacggatgggggaacagtgacgtggattttgcgaatacgatagaacagctttctgtgagagggataccaaccgttggggtgaattttgtcggtacggtagctggatttgtggtaaccaatgaatatatggatacaattgtagatatgaataaaagtgccgagggcattgagacagaggtgttgggagaaaatagtgtgacagagctggaggccaggaaggcagcggcgtttttgaagttgaagatgagaaaaaaattatagttttgtgtatgtgaagttcgagataaaatagtcggccagcgcagcgttgcagacggacggatatagaagggagcaccggggggacagggccaggccaggggccgggggatagggaccagtcagctcgaggctccgttcccctcagctaagtcctaccagctgctaagctcgtcaggaaagccttcctcgctaaacagctggtggactggatcttcggctcactccgcttaacctccctgactggtccctatcccccggcccctggcctggccctgtccccccggtgctccctcctatatcctggcagagactcacttcacattcacggaaaacgggtggggaaggtcgaacgttgtacacttttcctcttgtttcccactattgatgactcgatgttttggataaatagctccccctggaacttccctatatccaggtgagaggaattctgcggcggtgggctggttggttcgggcgggagggagggcttaagttccggggacgattccgcaggagtgagtagagagtcttaggcaaaaccgggattcccgctggagattttttcggcagtcagggccgaaaaaaagtgagcatgggcagagaatgcacatcaagcattctttgcccatacgaacggtgctccggcggggattccggttttgtcttagactctcttcgcgacggaggtgtccccggaacataagcctccctcccccccgaaccagccagccctccgtcgcgggatttctctcaccgtccccccgccacctcacactttccgacttgaatcactttaagccgaagtccaagcgctatacccctaaatcccaattaagctgaaaaacaattctatattacacataccaatgcacagcttccgccacggcgttcggttttctgtttggtattgaaaggggtattctaggcaaacgcagtaaccgcgtcatggagaaactgggtacagccgcttaccgcgcggtcgtagtaagcggtaaagcggggatcactgacatacatggcggccagtcctctatgagcctcaggggtataggagggccaggtataagagagccattccttgtgaaggagcactatttccttgccggctgtgctgttgggggacaggctgttcgatacggcttcttccagtttggagagaattgtttcaccgagctgctccatggtcttgtattgctcttctgtcagattcataaattttgtattgtttgtctctacggagtcatttccgtatttgctgcggatttcttccccgtacatgtcttcatttttctgtatcatttcttttttaaatccctcaaatttttctttattagtcatatgatattctcctttttctttctgaatcgtttttgtgacatttttgatcaggagatccagatgttccctgcggcttaccagttccctcaggtgggatgtgagaacggaaaccgaatcaaagcctggggagagaagaagctgccggatggtttccaggggaacatccagttcccggtaaaaaagtatatgctgcagtttgtctacctcatcttccgtgtagatgcgatatccgctttctgtgtaatgatggggggaaagcagtccgatctcatcatagtagcgcagggtgcgggtagttattttggccatctgagccagttgccggatagtatattccatgatctgcctcctgtcatattactctgtatacagtattgtcttatgcgcattatcttaagacaattgtagtatacaggttaacgttggggcaaggtcaatagaaaaataaatttttttaatgcaacagaatcttaaaaaatgtacactgtaatagataagaaagagaacataagaagaggaggctgctgtatatgatagaaaaaatagcgaaaacaggaaagatcatgattctgctgctggccgccgggatgttgtgtcttgccggatgttccggagaaaggcaagagccagaaataccggatccggataccaaggagaatgtatttcaggggaaaatcatagaaaaccgggaggatgtgctcctgctgtcaggcatgagtgaaacctccgccagccttgtatctctgtcccctaaggagactcttgttacagatcagaacggaaagaagacagaggcctcagggcttaaaaacggaatgattattgacgtaataatgggagaagatgcgacaattgccgaatcttatccgggacaaatacatggacagaaagagatacgtatagtgggacaggagaatgatattacaggcatgtacctggaggcaataaaagagatttaccagatcgatcccggtttaaacagcggggtgaaaattatggcgttggatctgtctatgtctgtaaatatgagtgaggcggagaaaagcgcccttgcgtatcagtgggacagctggctcagaagtcagtctcaggatatggatgtgtaccaaaaaacatatgatgaattggtagaagagggaatgattgatggggagaagctttattttccggagggaatgctgatcacaattgaagacaaagagataaaaggggatagttttgaattttcaatctccaagtggtgttctggtttgggggctgacggtctggaaaactgtaaggctgtattcgagaatggcattgggacatatacaaagggaactgcctggatctcctgagcggggaaaagagttccaattagggcccgctgatggtataatgaggacaataccagaggttggggggaatggggacagatgaagccagaagatatcttttctgcagggagcggttttcttctctctgtcttggcagaaaaaacgaatcggtcagtcgactctaaaaaagcggaggcaaggctgaaggagatggaagcaaggatagataaaaaacttgcggcagtttcccagccagacatacgggaacaaatgcagagttacatactggaatattttaaatctcatacggattcttgtcttacaggcagtcaagtcaaaatgaagaattttcctgaagatttccgcagaaaaaaaggatgctatctgaacagggaaaatgccggaattttggaagaatgtctggaagagatagaagaggaattcaaaaattttctggatcccgggcacatgattatgtatcaggagattcaggatattaaacagattgttcaggagagcagtgataacagtaaacaaactttaaatctgctgaagcataaagagggactgatgcatgagtccggggaaaaagaggggacggagccaaagaactgttctgaaaatgtgacctgtgaagtactgcaaatccctgagaagtcccaggcgggggcactgcaggcaaaggagccgcagaagaagaggcaaaaaagaagcaggattggagctgttctgtgggctgcctgtgcggctgtgggaatttacggggtactggttaccgccggtactccccgcaggcttatatgggagaataaagaggctgctgtactgtccgtccaggaggaactggcatatcagcagatggaggaagtctgtggggggtgcccggttaaaatgacatatgtgccggaggggacaaagtttctggaggctgatgtagacagagatattcagacggcgtgtctttcctatttgtaccagggcagaagtcttacttacaaagcattttcccaaaaaagagacgggtcctatgcctttgtatcaggagaagaaatgcaggaagagcgcacagtagatctgcaggcagctgaggccaccatatggaaactccggtctaaagaaaatggggaaagcggatatgcagcccggatcctgtatgataatatctgttatatggtagtgggaaccatggaacgggacgagttccaaaagattcttaatggtctggaatttgcgtaggatacctggaaggaggcagagaatgaaaggaaaaacagcagtcctgctgtgtatgggagtggtattgagtgcctcgctctgtatggggatgccccggacagaagcagaggctgccgaagaaaagaatgggatggggcaggaaggcgttatccagtatggggatgcagcggttaccaaggatgagaaagagcagctgctggcaggagggatgacggcagcttcccagacagcggatgagatatctgtagaagtgacagtagaaaaagcggaggggaacggtacgtggacagaggtttattcatggaaggcagacagagagaattcagtgtatctttcttccagcaaatccattgttgcaggaccgggatattacagagtcaggtgtgtccacagggtaaatgaggatgtacaggaatcctgcacagatgctgtgtggataggcaaagagagggtgagaatatagaacccctctctttttattttagaggaatgaacacagaggctttaaaaacctggtctcccggttcaaataaaactaagccgccgtggtcttccacaatagatctgacggaatgtatccccagaccgaacccctttcttttggaagaaaagtatcggccctctttctcttttattatcccgtcaaagctgttgtctaccacaaggcgcagctgccgtcctgtggtctcaccccgaagatagacaaaacgcttgccggaggtctgccgttcacaggcctccactgcattttccagaaggttgccaaggagaatgcacagatctgtgtcagagatattaagggactcgggaagctgaaggacggcgctgaaatccgcatggatacgcagagcagctcctgcataataggaaagaatggcatcagctgcaggatgattggaataggtcatgacatcccggggctctgtatggggctcgtactcctccagatatctgcggatatcgggcagagaagctctgtctgccagtgtccgcagtgtccgcatatgatggcgcagatcatgggacgccgttctggcagcctctatctgctgtgtcagctgtcggtaatgttctttctgcatggagagctggcgttccatcagacggtgttcttcggccagagtcaggctgcgcttataagcctcccccagatctctgcagagagcgcatgccagccccagcataagtccagtgcctccgatttctataaaccagccgccccgtataggttcaaaaaggggcatcaccctgtctgcaaacagagaaacagcaaaaaactctgaagtatacaaaagcagcagagagaatcttctccggttccgcactgctacgcctgagacgattaaaaggtaaaccgcagatccatatttgagtatgccagacagcagagagaaaagataaaaagcagtaagacccaggtgagcggcgcttatgccggtgataagggcgatgacagctcctgctgcgcagataagcggccagatacaggctattttccctctaatctgacacaaactgttttgcagtaatacggccatcaggagcatggcatagaagcagaaaagctgtatggcataccagggatgcacgtgtgtggcaaaaaaacggtgcaatagggggaaagcagtatagccaagaaagaaaatacactgcaaagcatatagcagtcctttgttccagtgggctctgaagccaaggtaaagagacaatagaagtccaagtgagcccaaaagcagggccgccatccggaggagcaagtagttttcccgggcgtttatgacagtatctgccaagccaaaagcagggggatatgtgagcccgctgtagatccaggaataatcagatacggccagaagcaagtttacagtgccttccccctggaagacaaccgttttttcttttatgcagggggtatatgattccggattgggatccccggattgtgccaataattcctggtttatatagagggaataggaggaaaagatctccggaagttccagtgcatacgtgcgtgctccctttggaagctgaatagtcaaacggtatgtgccgctgccgtgtggagaacggtggatatttcctgcttccaggcctccgtactgccccacagaaatatattgccggtaggaaccgggctcttttgcagcaaaggtctgcggtgtaaacaggacatcaggataaaactcccattcccggataagataacgcaggggagcttgttgcagatccttctccgacagggaaaggatcccgcatatgggctgtgaggtttttttcgtatatttattgtctgtctgataaagaaagtaaaaaaacaggaaggaagacagcagtatagccagagagactgcacccgtaagcagaattcttttaaagcgtttcatgcattttcctccttctgaaaaggataagtaaggctatgacaacagcagacagaagaaatacaaagagaaggaccggaagatttattgcggccgatactgctttctccgtctccataacatagtattctcttagagtaaaactgcctgtttcgtatattttagcagaagcaatccggtgcttatcactgtatgtcacgggttcctcggaaccagtgcccacatgaaccagtgccaaaaggctgtaatctgtcccctgagaaggggtgtaaggaagggaaacggatgcttcaggcagggttacaatctcctttccgtctgcggtaacggacaactgaaaagaaaaatcgtcagttttgcgaaggagaatttccagcagcccctcatcgctcagagcaagagaggacagaaaagaagaaggaatctctaccgatataccatttttttcaaagagaacagaatttggattgatttccagaagctgtcttaatctggcacctgagatggccgttatggaatctgtactttcttccttgacctgggagtttttttcttccttgggtgatatactttctgcaggtggtgttttagtgcctgcaggcacagagggttccacgctgtccggtgtatctgaggtgttgtctgttccctccggagggtatacagcttgaggcggagtgaccggaggggaaggcacagtcatttcagggatatcctgggagaccggaggcaattcctgctctgtgcgatcccctccatcgttgtctccgcctccgaaaggatcaggctctccgaaggtaaagggaagaacattagagattccttctattgggcccccagttacagtaagacagaatagataagactgatcttcattcaggccgtatacctgagcaccataacaatcgatatagcttccgggcagttccagaatatcgttccaggatgccccattgtcagcggaatagtacatgtgtatctctgctgcctctgtaagttcagtgaaaaactggatccctacggagtccgtcaactgataagctgctcttaaaaacggccggccaggatccacaatatgaaccgggatctccagggaaggcagtactgcaggaaaccagtcaggtacctgaggggtaagggcagccaggtaagtcccggggagggaataatcaaccaggctgtcctcccaaaggaactcagtcagatatgaaagatcatatacatcttcttccctgcagactagacggtagcttaatgcggtcttgtaaacctcttcccgggaaacgcccaggggaaagcacaggcctctctcctggattctttcttccggcattacggaagaacggctgattacttctgcatcctgcagtgcaggagtgacaaggcattgatccagccggacaggttcagatgtattcactgcctgtctgtcttcactggatatactgcagagaaccagctgaagaggacggtgagaatcaatgcccacagaaccatttccctcagcctgtaccctggaggcggttacttccgataacggaccactctcaaagtatacccctgtagaattagggccgtccacaaaaacagaagaaagatcggagtaccaatacccgttttcgccgataaaaatagctgtggcagaattcccccgggcggtaatttcaacctgtttctccatagacagtgaaccctcaacaacaaacaggggccggaccgtcccgcttccctcaaagtgtacggggccctgaatgtacagttcataatcttctggtatcaaaatactgaagtcacccatattaattttggtgggagcggatacctgaggcagaggcgtacaagtatcccatataatatcgtccgtaagggagatggcgctgcccggatgggtcagcagtatctgatgaagctcctccgcagtagaacattcatactgtgaggaggcagcctgggcggaagcagggaaaaagcagcaggaaactaaaagccagcacagtacccaaaccagaaacagcgtcctccttttcacggaaattccccctctcgaagtcccttcagagtatactccagaaatgtttttttgaccacacctcttccccgctggcggacaggtacatgctcttgatttttcatgataaattcatcctgaagtacacattctacccagtccatattcaccaggacattccggttgcaggacaggaaccgggcatctttagacagtatttccagaacggaggcaatgggattgtcaataaccagctgtgtctgctccagatgtatatgagtttttcgggccaggcagtccacaaacaatatatccttcataagcagtttcatattcagctggcctttgacggaaactgtcagatatttattggcttctgtcaagcgggcgcatacacgatccatagcctgaaaaaaagcagactctttcagaggttttgtcagatagtaagcggcctgtacttcatagctctccacagcatgcatctggctggcagagatgaagaacagggggcaggatgcatccgtctggcgaactgttcttgctgtgtccatgccgctgatgccgtccatataaacatccagaaaaacaagatcataccttcccggctgaaatgctttcagaaaatcttcccctgttgcataggtatcataagtgtacagtgcgttctctctttggaaatatacggtaagcttctgaagcagttcgtgcctctcgctttcattatcttctacaattgctatatgcatgtacctatcgctcccttctttgacactattttatcatatccctctctgttttacattgtctaactgtgattttgggtagcaaaaaatgactttcggaataaaaacaggctgctttacggtagacaaatatgtctttgagcaaagaacggttttttcttttttcttcgcatgctatgataaaacatatagcccaattcagggcgttctgctatgaattcaccgggcggaccctgcagacatcctagggctgtgtttggacagcgtaaaacaggaggtgtcaagatggaagagaaggaaaagatttatataactatatctggacgcagtcattattcttggcagggcagtatagcatataatggaaaggtttctgcattcagcagcgagctggaattgataaatatactggaaaactatcttccccctgtctctgtaattctggagttcaggggagaagaggagaataagtaattataggattacggtaaaggtggccccgcctcccggggtatctgttaccaaaagttttcctttgtgaagccgtacaatctcttttgcaatggacagacccaatccaaaatgttccttgcaggtacgggcctgatcccggcggtagaaccgctgaaaaatccgctttttttcctcatttgggattcccggtccgttatcggccacggaaagatgaaccttatggccagtacagcacagtgaaaggcagatttttcctcccggaggagtgtagcttatggcattatccataaaaattgagagaatttgggaaactctttcctcgtcacagagtattggaggaacttcttcgtccggcagccggacggttagatccaggctcttctctctggccagaagctcgtatttttcgtatactgtaagtactaaggtatctatggcagcgggagcaaactggagattccaggaatggctgtctgcatttgccagctgcagcatttcgtcaataagatgggacatcctttttccctccgtacgtataatttctgtaaaatgccgggattcttcaggtgaaacattctgagatgccgtcagacaggaaaggatgactgccagaggggaacgaagctcatgggaggcagatgctatgaagcctgcctgctgccgtctattttcctccagagggcggagaagctttcccataaagaaccagaaaaaaatacccaggagaaggacagcggcagcatccgcaccggcaaattgccagcgctgtgcggagagctgttttttttgcgtctcaagaggctggagaacgatgatgcttaagtgtcctgacttttttggaagaaggattcctgaagcaaagtactcagtaccctcgggagtcttcagcttaaattccgtatgccgggaaagaagaacggagttgcccggggcgttcaggtccagcccgtaggagtctttggcctttgtagctgcctgtgcaaagacctcacgctcttttgggcttctgcggagttcctggtaaaagagcgcctgtccgttgtcatagatggagagaagaaactgatgatttttctccatcttggcgatccactgaagtgagatggtagactgactttccagatgagtaagcatggagcttaaattattggaaaaggcagtctccgcgttttttatctggtttgactgggaaaaataaagacagatgcaggtcatggcaatcagtataacgccggtgatgcctgtacaaacaagggtaagcttaaactgcagttttttaaacatccgattcctccagacagtatcccactccgcgaatggttttcagtgttaaggcagcattcactgctttcagacgcctgcgcacaaaatggatatagttatccagattgccttcctcgacctccgcatttggtccccatacccgggttagtatggtgagccggggcagagtctggcgggggtttcttagaaagaattccagaagagcgccttcccgttttgagagaatcacttgctttccgctgccgcctgtgagctgttttaggctgggattgtagatgatatcgcccacggaaatctccgaagacagctccagtcctataggccgccggctgatacagcggatacgggccagcaattcctgaaattcatagggttttaccaaataatcatctgctccgctgtttaatccggttatcttatcattcagatctcccagagcagtaaccagaatcaccggcgtcattatctgatcctgcctcatccgatccaaaatcgtaagtccgtctaatgatggaagcatccgatccagcagcaccagatcatgggcctgctgccgtatcatatccagtccgtcctccccgtcacagcatacgtcagacagaataccctcccgcttcagctgaaactgcagagattcacttaacttttcgtcatcttctattattaatattctcataatcttcacctcttaccagtaattacattcaaagtatatcacaggaatctttattttatctctaaaaatagagaaaatttagagacagctttagagaaaaaatagagacaggagtgttactatagaggaaatcaaagataagaggaggagtttcatgaatacatattggaaaaaagccgtctgcctggcggtgtctctgaccctggcagtatcagggctggccggatgtgccaaaggagaaaaaaagaatgaggagaaagataaagagactgcaatggggagatatctggagtctgatatgcctctgcctgaggggactgagagaatactggcgctgggaaagctggaggatggcagtctggagcttttcggggaaagcggtgagggaggcaaaagagtgctgtggcagtcaaaggaccagggggagagctgggaggaaatcagctgcccggatattatgaagctggaaaacagtgaatatctggaccgggcggtgatttcacccaagggagacctggcagctctgggagtcgccaatggggaagaaaaatatgctcttttctacggcggggcaggagaaagcggacaaaaagtcccggtggaactgcctgcggctgaaggcggaaacgaaaatgggatatcggatatgaaatttgcaccggacgggaggatgctgatacgggactatgcgggaaatgttcataccatagatcctagcagcggacaaatccttcagacttataagggatccggagaaaagatttggatgtttgaggtattggatgacaagcttttggctgtaacagaaactcaggtgcagcttttggatctggaatcaggagatcctctggataaggatgaagtactggaggaacagatttttaacggtgaaggcattaagaatacttcgtttgccgggtttaatcccatggtgtttttgcaggggaaagaagagaatacgttatttctttgcggaagggacggcatctacaggcatatctccgggggaagtgtgatggaacaggtagtgaacggcgggctgacttccctggggaatcccagtctgggacttttgcagatgataacgcttgaggatggaagctttatggtttcctgtgccattggaatagactaccagcttctgaagtatacgtattctccggatacaccggcaatgcctgagaaagagctcaaggtgtattctctggaggataattcggatatccgtcaggcaatctccgtatatcagaaggagcacacagatgtatatgtgaatctggaggtaggcattaccggagaggacggtgctacggtatcagatgcccttcggacgctgaacaccgatataatggcaggggaaggtccggatcttttgtttttggatggtatgcccataaccagctatatagaaaaggggctgttagcggacattagtgacatcccggcagaggcagggggccaggacggtttgtttgaaaaggtggcaaatgcatttgcaaaagacgggaaaacctatggaatccccttaggcttccggatcccattgttccagggggatgaagagacagccaaggcggccggcaatttatcctccctggcagaaagagtgaagagtctgagggccggtaatccggagatagaatcaatattgtctcctgctgatgcctggggccttctggaaaccttgtaccggctggactgtgcagactggcagaaggaagacggaaccctgaaagaggaagcagtaaccgaatttctgcgccaggtaaaggcaatctatgatacgggaatccccaaggaggaggatacctcaaacgtcggaacctttgaagttggagcagggggagcgggcggatttctgtccatgcgggtagattatatgagtcttatgatgaaaaaggctctggccagtgtgggctggatgggctctgcatctgagtattcctcagtcatctcagctcaaaaggatttggaagataacgtatataagaacattgagaaggatggaaagaaagtatttcttccttatctcacagcgggagtcagcagtaaaagtgaaaacaaagagctggcggcagactttttaaaggcgctgctgcaagaggagatccagagcagtatcaccggagcatttccagtgaacaaaaaaggttttgagggtacgctgaagaatccttatggggaggagggcggagctgaactggctgtttccggtgagggaagcgatgatatgtttaccatgtctttgctttggcccgatgaggaacaactggaggaattacggcagatgctggaagcggccgatacgccgtcgcttactgacgagaccatatggaatgtggtaaaggaacagggagaaaaatatctggagggcagccaggaactggaagaagcagtgaataatattatgcagaaagtaaatctgtatctggctgaataaaaaatgaaagttatgacagagaaaaagaaagtgagcatgtgtacaaaaagagggcggaccggactgttgtttctgatgcccagtcttgtgggggtatttctgtttgtattaattcctttttcggatgtaatacggagatcctgtttagatgccatggggaatcagtttaccggtctggataactaccgggaattgtttgccaatcctgcctttggtctggcggtgagaaatacgctgcggtttacccttatctgtatacctgtccttttgcttctgtctttaatgacctcagtttttttgcaccggcaaaggcggtggggacagatgctcaaaagtgtgtatctgatccctatggccattccggtagcctctgttgtccttttgtggagagtgcttttccatcagcaggggattgtaaacgggatgatccagtggctgcatctaccggcaaaggactggatgaattcagacgcggctttctgggtactggtcttcagctatctctggaaaaatctggggtatgatattatactgtggaccgccggactgggcacaatcccggatagtctctatgaggcggctaaggtagacggtgcaggagagtggatgtgcttttttaaaatcaccctccccaatctgctgcctgcattcttcaccatcagtgtattgtctcttctgaattcctttaaggtgttccgggaggcgtatctggtggcaggagattatcccaatgagagtatgtatcttctgcagcatgtgttcaataactggtttcgggaactgtccctggacaaaatggcggcaggggcagttatgactgccctggtcattctggccctggttctgctgctggagagggcctgggataaaaaagagtgaggtggtaacagtatgaaacaaaaattaatactctttttcctggtcattctggcggttgctgcctgctacccaattatttttttaatcgcaggctcacttatggggtatcaggagctgggagcatatctggctcctgttctgggagaggcaaaaggctttgccggatggacgctgttcccggtgtatcctacattgagagggtatgtggaactgctgctggattccccgtccttttttattatgttctggaattctgcggcaatcaccgggggaattctgatcggacagcttctcactggggtgactgcggcatggggctttgccagatatgaatttgcgggaaagcgggtgctgtttacaatttatatagctctgatgatgatgccgtttcaggtgactatgctttccagctatctgatactgaacaaactggggcttctcaatacccactgggcgctgatactgcccggagcgttttctactttttcagtatttcttatgtatcggttttttacatccatccccgaggcagtgatggaatcagccaggcttgacggggcgggagaatggcagatatttatgtatatgggactgcctctgggctccggggggattgtatctgcaatggttttgggatttctggagtgctggaatctgattgagcagccgctgacatttttaaaggacaaatccctttggcccctgtctttgtatcttccggaaatcagcctccaggacgcggcaatggcttttgcggcatcggtgataacactggcgcctgcccttttcgtgtttctagcggggcaggactatctggaacaggggattgtagcagcggcagtaaaggagtagatatgagagaactttggaaaaatcacgaggccatacgcagaaaggctcttgctgcatttgccgtttttctgggaatgatgctattttttaccgtggtttcccgtgcggctgacagtgtcacagttcctcagatagtggcagagaagccctccggcagggcgattgagcacaagattgaaaaggaaggcaaggtaagacaaaatcgggagcaagcagttcttacagagccgaaccttacggtagatgccatctacgtccaggaaggacagcagacagaggcgggggagcttttaatgcagctgaatatgacggacattgaggaacagattctgactctggagcaggagatagaaaagctaaagctgaataaccgggatctgaacagcaagaagaaagcagatcaggaaaaaaaggcaactggagaggaacgggccagggaggattatcaggaggctgtccggaaaggagaagatgatgtggccagagcagcagaggacctggcacaggccagaaaagcccttgatgactattaccagaatgcggaggaagcacaggaggactcgggagtgcttgagacactggaaaaaaattatggggaaaaaaaagaacaggcccagaccctggaacaagaaattacaaagattgagacccagacagaggtggaggtccaaaaaagaattgaggaggcaaaggccaaaaatggggggagcagtcttacgcctcaggaggaaaagaagatcagggatcaggtagaagcagaatacgcacctaagctggagaaagcaagatcagacgccgaagcggcccgggaggcggttctggaggcagaagcggcatggaattcctatgtgcaggagatgggctctcttagcctgcagggatcggaagcccaggaacagcagctcctagaggcagtgtctgccgcggaaaaagcctaccaggatgcggcatacgccgcccaggagtccgcaactgctgccggcagggcaatcgaagatgccaatgctccggagggcagtgacagcacatcaaaaataaatgaacttgatatagagaaaaaaaatatggatctggataagctgaaagctttacaagaacaggaaggcaaaatcctctctccggtgaaaggggtggttactaaaatatctgtaatgaccggggataaaacccaggaaaccgcagccctgactcttgcggatataagctcgggctgtaaatttgtcactcagatagacaaagaggaagcaaaatatctgagcagaggtgatgccgtcagcctgacgcctgccaataacggaaccgtcattcaggacctgaaggcggacagtattaccccaaatcaggaggatcctgcgcttatggatgttacggttcttctgccggcagatactctggagattggggcatccgccactatgacagcagtgcagaaatcatctccctacgaaatctgtgttccggtggaggcgcttcacctgtcagaaggaaagtactatgtgctgatccttcaggaaaaggagtccgtgctgggaaaacagctcgtggcagagaggaaggatgttattgtaaaggataaaaatgagagctttgcagctttagagaacggaagcctcacacccaagcagcaggtcattacccagtcggatcgggaaatcggagcaggcagcagagtacgcctgcaggaaccgtgaaagggcagttgggagtgctgggaagggcagcagcggcaggcctttgtctaatctgcttttctctggctcagacagagacctttaaaacagcacttcccaatgatacagaagaaattatactggagcagggcgcctggagccgggagcagtgggaagagatggtcgtaaacgaagaggacagggaatttccggatgcttttatcctgtggggagaaaaggaagaggtgcagatcgtcagccgggatctcaccagaaccgccaacgtaagtgcaattgaggcatgcggtgattcccgcctcctgcttcgggaaacagtctctctcaatgaaaaagatacagagggctgtctgctctcggcagacactgcctggaaattattcggcagcacaagggcagtgggggaaaaaatacaatacggagagcggacactgactatccgggggatcctgaggcaaatgaaaggtaccctgttcgttcaggcagaaaaaggcggtgaagctatcctgaatactgtgacattaaaggccggggggaagagcggctccctggaggatcctgccagaagttttatgatgcggtatgggattcaggggaaaaaggtgcccgtaaagtactataacagctggtctgtctttctcgtctttaccctgccgctgtttatgcttctccgggtgctggcaaaatactggaaatccatagacagaggagggaagcgggtagcagcagtatggggcatagtgctgatggcggggatggggattctgttcctctatgcctttggcttttccttcaccctgccaaaagatttaattccaaccagatggtcagattttcaattctggaacagtttgggagagcataaaggggaggagcttcttctccttctcagaatgagaaaaagaaagccggaacttatgattgcccagccgtttttcaactgtgtaaaatatatggccggggcctggatatgctatggagctgcttttggaagatggagaagagtaagcggcaaagcagcggtgtccggcatactgctggcctggctcctggtgtttattgtaattctgctgagaaaagaagagggaagtctgctgatgcagtccagaggagtgtggttccttctgccgttcgaacttaccggaaggtatttgtattccgggacgtgttccttcgcagaagaacacgtcccagaataggagggacctgtccccttttgaatatttgcccgccagaatttcaaagaaagactaatggttataattttatcgtcataatgattggtatggatgcatattatataatataaaaatgctaattatgtctaatatatccgaggaaattgggagttaccctatttctaaaaggggacgctgttctgattaagaacaacgtcccctttgatgtcagttatttagtattcgctgtactagagacagaaaacagactattcctgaattccgggaatcttaggcagtcttgcaaagctggctgccagctcttcgtcggtgggaatgtaatcctgcatggttttatccatgtaagactggtaagccaccatgtcgaaataaccggttcctgtaagaccgaagagtatggtttttgcctctcccgattccttgcactttaaggcttcctgcacagctccgtaaatcgcatgggcagactccggtgcagggagaatggtctcctgctttgcaaaggtaacggcagcatcgaagactttcgtttgttccacggacatagcttccatataaccgtcgtggtacagcttggaaagaatcggagacattccatggtaacggagaccgccggcatggttggcggagggaataaaatcacatcccagggtatacattctggccataggagttacctttccggtatcacagaagtcataggcataacgtcctctggtgagagacggacaggaggccggctctacagctatgattctgggattcgattttccggttaatttatcctgcataaatggagcaattaatcctcccagatttgaaccgcccccggcgcaccctactactacatctggatattcatccagcatttccatggcggttttgctttccagaccgatgacagactggtgaagcagtacctgattcaaaacagaacccagtacatatttgtagccctccgtagaaactgccttttccacagcctcagaaatagcacagcccagacttcctgtagtatttggatttgcttccaggattgcccggcctacattggtggtggtactggggctggggataatgtctgcgtcaaaggtatgaattacggatttacggaagggtttttgttcataggaacactttaccatgtataccgtaaggggcagatgataaaaggcacaggcttctgcaagtgcagttccccactgtccggcaccagtctcggtggtgatacccttcaatccctgttccttggcatagtaagcctgagcaatggcagagttcagtttgtggcttccggaggtattattcccctcgaacttataataaattttggccggagtatccagatacttttccagattgtaggcgcgaatcaggggggatggacggtacattttgtagaaatcctggatttcctcagggatatccacatagcgggtgtcgttatccatttcctgatgggccagcttttcacagaaaacaggatacagatcctcttctgtggcaggctttcctgttccgggattaatcataggatcaggaagttccttcatatctgcacgcaagttataccattgttttggcatctgctcctcagttaaatatagtctgtgtggaatttttttcatagtcaataatctcctttctgatggttgattgctgtgtatcccctgcgaacccggaactggtcagctatgtgttacatctctcagaaagcggcagaaaaaaacggcttctgccccttgttcagggacaaaagccgtaacacgtacgatcttctgcggtaccacccggattgatgttatacatccactctgtcatacactaacatgcatggttccttgataacgggtgaacatcccgtcggatattactcggctgcgcctttccttccgacctcataagcccattcaatatctgctttcttatctcactcgcaccacctgagactcgctggaaacaaaggaaagatatctactcttcttactctgcggtttcgctttggttggtattataatataaagcatttggaaatttgtcaatatgttttagaaaaaaatattattttttattatctgtacagctattttaactgtcatatggcagcaactcgtttcgcaggaatccccagtcaatctgcatgatatggtcgctttctcaaataagatctgctcaggacaaagtacacattcgaacaaaaaggcacacgaaataactttctgctatgcaagcaaatcacacaatagcttattaaacctttcgctttcgctccattggggaaagtgacaggaattctcaaaccaataaaactgcttttccgtttcaatccgatcgaagtagttctttaccagagcagaagacacatgactgtcatatctgccctcgataaatatgaggggggcaccatagtgtgtctgtccttcaaagtctgtctgcatgacttcctgccacagatattgtatggcttgcaggctgcccttttggcgccgtatcaaatcaggaagtgtgtaatacggggagaacaaaaagggaatgaccaaatcattataatttgttctcccataaagagaacccttatgcctgaccacctgccttgtaacaaaaagcaggtcgtttagccaactgtccgtttgataggaacagtcgatccctcttaatttttctaagctctttttatcagcgtgtgccagtgcatactcataggctgttttgctggattgtctcatattgacgacttgcccacagcctatataagtacgcaccaattctggatatgcctcgacaaagcgcagccccagaatgctcccccatgaatggcctatcaagtacaacgaattttgttgaaaccgggacagcagatagttcacaaggacgtggagatcattcagaaaatcgtcgattgtaacgggaccgataaatttgtaataggacttccctgccccgcgctgctcccatacaacgactgtgaactgctgttccaacatcttgttgtacttcatcaccaaaggcaatgcggcgtctccggggccgccatgcagatagaccagcaaaggagcctcttttttttccccgcgtatagaaacaaactgaggcacaccgtttagattcattttagactgttcatttataaacatttctgctaccctccctattcgctaagtagaatgggcagagttcgcctaaggcgcccaaacacatatttagctttttcatttctaatatgagcgcatggaagtgtcaaacagctcatgttgtttttctgtttcttgcccctgtttgtccgcttgggcacattttgccctttaccgtattgtattgcctacagcagaaatatgggatttatggacttttccggttgggaaaatggtttatagccgctgatagttctattttttattctttttacattccacagcatccacagcgtctaagaccgcggcacgaagtccgccccgctccagggcagcaacgccgacgatggttgtacctcccggagagcatacagaatccttcatcgctccagggtgctttcctgacagcagatgcagctttcccgttcccgcaaccatctgactggccagagcgtacgccatctgtctggaaagcccgtgggttacacctgcatcgcccagcgcttccaggaacatactggcgaatgccggcccgcagccgctgatggtaccggctgcacttacatgggcagaatccagcacctgaaccagactgatgcgggacaaaagccctgtgagcagagaaaactcatcatccgtgagagaatgctgttcttcgcagataaagactccctcgcccacagcgaccggagtattggggattgagctgatatgatgggtgccgggaagaagctcctccaaagtctcaaagggataaccgtctgccacagacaggatgattttatcctggagcaagtcgcgtacaggctccataacttcttttaccatatatggtttaacagcgattacgacgatctgggaccgggacactgtttccctggcatctctgcaggcgtgcattccctgatcctgtgtatttctgcagagcttatcccagtttttcgcacaggcataaatctgctccggcttcagcacttctttgtaaagcagcccctgggcaattgcctgagccatattgccgtatcccaggaaaccgatggtaatatctttgtattcattcatgaaaatgacctcttttctcagatgtgatagtttattctttaccgttaaaacagtaggtgcacagtttacagggaggcaggccgatggacgcaatcaggtcatccagacggtgaaaacgcagggtagtaaagttctgttccttgcgtatagcctcaagcagcgccgcatagcgttcggtagtaggatctgcgtagtcagccagtgcttcctctacatgctctccttcccgttccctgataatcctgcgggtgataagatccagttctgatttagaacgggaaaaattcagatatttgcatccatagatgagaggagggcatgccggacgtacatgtacttcttttgccccgctgttgtacaggaattcagtggtttcccgaagctgtgtcccacgcacaatagagtcgtcaattaacagaagcttttttcccttaatcagagcatgtacagggataagcttcatccgggcaatcaaattcctctgggcctggttttgcggcataaaagagcggggccatgtaggggtatactttataaagggccttgcgtatggaatgccggattcattggcatagccgatggcgtgtgccacaccggagtccggaacccctgccacactgtccggacgaaccagattctcatctcttttggcaagcatactgccgcagcggtaacgcatctcttccacactaatcccctcgtacgaggatgtgggatacccataatatacccagagaaaggaacagattttcagttcatcccccggttcctttaatgttgtcacagactcgggggttacaaatgcgatctctccaggccccagttctttataatggctgtagcccagattaatataggcaaagttttcaaaagaaacgcagtaagcgccctctttttccccgattaccaggggcgtccgtccgtagcgatccctggcggcgtatattccctctggggttaaaagcagaagtgtcatggagccgtctaccatctcctgtacgtactggattccctctaagatagaatccttttgattcataagggcagctaccaattcagtcgcattgatctgcccgccgctcatttccagaaaatgggtgtgtccgtttgcataaatctgctgtaccagctcgttcagattgttaatcttgcctacggtagtaattgcaaaacttcccagatgagactgtaccagaaggggctggggttcataatcagagatacatccaatccccagatttccctgaagttcctctacatcccgctcgaacttggtgcggaagggagaattctcaatgttgtgaatggccctgctgaagccctttgctccgtggacagccattcctcctcttcttgtaccaagatgtgagtgataatcaacgccgtaaaacagatccagcgtacagttttcttttgcggcaacgccaaaaaagcctcccatgtgtttatttctcctttgattgtaatagattaggtttgtagcacagatatagaattagtttaccatatatttaccaaaaacgaaagggattatgaaaattgggatttgacttcctaagcttgagactgcacagtcggaaggtatggggtggcagggggacggtgagaggaatcccgcggcagcgggctggctggttcggacgggagggaggcttaagttccggggacacctccgtcgtgaagagagtctaagacaacaccgttcgtatgtgcaaagaatgcttgatgtgcattctctgcccatgctcactttttttcggcccggactgccgaaaaaatctcctgcgggaatcccggttttgcctaagactctctactcactcctgcggaatcgtccccggaacttaagccctccctcccgcccaccgccgcaggattcctctcacctgggtatagggaagttcaagggagttggctatttatccaaaacatcgagttatcaatagtgggaaaccagaggaaaagtgtacaacgttcgaccttccccacccgttttccgtgaatgtgaagtgagtctctgccaggtcaagggaggaggtcttggggccaggggtactgtgtggagctgcgcagactacggagtgcgtccgaagatccactgccggcggtcacttaggagcgaaggctttcctgagcttcttagtgaacggccaggcagttagcagaggagaaacgcagtagcaagcagatccacacagtacccctggccccaagacctcctcccttgaccgtccgtctgcgacactccgctcgccgactattttatctcgaactttacatacacaaaactataatttaattttaaagaattctatggtataatacaaaaaaccacagataggactcaaatcatatgaattataaactaattatccaatacgacggtacccgctatgacggatggcagcggcagggcaatactgagaatacgattcaggggaggattgaggaggttctctcacggatggtacaggctcctgtggaagtgcagggggccggcaggacagatgcgggggtacatgcgctgggtcaggtggccagtgtgtatctggatacggatgcttcggaggatgaaatctgccgatatttgaacctgtatctaccggaggacatcggggtggtagaggtaaggcaggcagctgaccgttttcatgcaaggctgaatgcttcaggaaaggtgtaccgttaccggattggcatcggggcgtataagaatgtatttgaaagaaagtattactatcctctggggaaggaactggatgtggccgggatgagagaggccgctgcacttctggtaggggaacacgattttaaaagcttctgttcaaataaaagaatgaaaaagtcaacggtgaggagactgagaaggattgacatccgggaaaaagctggagaaattgagattacttacgagggggatggatttctgtacaatatggtgcgcatcctcacgggtactctgatagaagtgggacaggggaaacggtgtccggattctatgaaagagattctggtgggaagaaacaggaaactagcaggctatacagctcctgccaggggattgattctggcggaagtgaaatattagggaaggtacaggagaaaaggagagaagacaaaatgacagaacaagataagagcgaagctttctggagggatgagcaggaagccatggagaaagccatgagagagaggattagaagaatagattcagaacccgctacgcatatctacaatatgatgaagcccgggttctgtgcctgcagtgccagggaagagtggctgacggtgcgctatccggtggaggactgggcgctgaaccatatgtcttccatgcacggaggacttatagccgccgcagtggacactacctgcggcatactctctggcaacagaagcaaaaatatggttacacccaccattaatctcaccataaattacctctccccggcagtgaagggggatgatatgctggtaaccgccaagatggagcggtgcggcagacatctggtaaatgtctctgccaaatgtacgggagaacagtcaggcaagacgatagcaaccgctctggtgagctttatgctgggaggaaaataggaggaacgggggatatggaaggcactacgcaaaatacatggccggagagttactacagcgaaaaagatcccgggctcagaaggatacttttggaggaagagatacggcagcacccgggagtttcggagaatgatctgaggcagaagctgtgggaaatacgttatgtctccagggacaaaaaaaacaccggccagcaggtggacaattatatcggaggatggatggagatgctctatctttccaggaataacggggggcttttcggcttccggtatgctgcaaaagagctgaggaaaaccataaaaaaaatgggattttccgaggcggaagagtacggggagacgggcagggaggtcctttaccgtgagatttatcatctctgttccttttactaccatctctgcgcaacggataaggggtacggaacgaagcttatgggaatgatgtccatgaaggatgaagacattaccatgaagatcgcaaaggaagtactgcagaatgcgtacaggcttcctatgaacacaggccttgtccaggagatggaggtgtttacaaaagcggccactcaggcattttatgattattttccaagggaaaaggataaactggacagccaggtggagaagttgagaaaataattgaaataattcaaaaagcataagaaaaagttgaggaaccccagaatttttgggacaattttcctcagcttttttctgtttggttaagtttccgacatggcatacaaaaatttttagatatacttaaaaatttttgttaaaaactattgctattgcttattttccatggtacactctaactatcaagagggtttttatatttttttctaaatgaaggaggtaacacatatgctggtaattggcaacgggagaatgattacaagagatgcagagaatccatttatcgaaaatggggcagtggctatggatggaaacaccatcgtgatgacaggaaccacagaagcggtgaaaggtgcttatccgcagacagaatacatagatgcaaaaggaaaaatcattatgcccgcctttatcaatgtgcatgagcatatatacagtgcctttgccagagggctgtccatcaatgggtataatcctgacggttttctggatatcctggacggtatgtggtggaccattgaccggcatctgactcctgagcagatccgctacagtgcgctggcaacgtacatggactccattaaaaacggagtgactacagtgtttgaccaccatgcaagcttcggccatattacagacagcttgtttactatagaagacgcggcaaaggagctgggaatccggacctgtctgtgctacgaagtgtcggatcgggacggcaaagaaaaggccagagaatccgtgatggaaaatgccagatttataaaacatgccctggaagatgagagcgatatgattgcggggatgatgggaatgcatgcgtcctttaccatatcggatgagaccatggcccttgcggctgagaacaaacccggggaagtgggataccacattcatgtggcggaagggatagaagatctccaccattgtctgaaaacctatggaaaacgaatcgtagaccggcttatggactgtaatgtgcttggggataagacgcttcttggacactgtatctatgtaaatgatcatgagatggatctgatcaaagagacagacaccatggttgtacataatccggaatcgaatatgggcaatgcctgcggatgcccgccaactatggcaatcgttcacaagggaattcttacagggcttggaaccgatgggtatacccatgatatgacagaatcctataaagtagccaatgtacttcacaaacaccatttatgcgatcccaatgctgcctgggcagaggttcctcagatgctgttcgagggaaatgccaggatagcgggacgatactttaaaaaacctttgggtgtactgaaaaaaggtgcggcggcagatgtgatagtagtagattatgatccactgactcctatgaatggtgacaactgcaacggtcatattctgttcggcatgcagggaagagatactactaccactgtatgtaacgggaaggtattgatgagagacagagtgctcaccggtattgacgaggaagcgactctggcaaaatgcagagaagaagccaaaaaactggcagatgatattaacagcagatagtgcgggaggtagataaaatgagtgatcggatgacatgtatgccattttcccagttaatgacctggattatggaggaaaagaagaagagaaatacagtatttggtacccacagtccttatgcagcaggtgatgagactctggaattgttcggaagaaagctggagaccccaatcggaccggccgcaggtccccatacccagctggcccagaatattattgctgcctactatacaggaagccgttttttcgaactgaaaacggtacagatcatggacggagatgaactgtctgcctgcgttaacaagccctgtattctggcagaggacgaatgctataactgtgagtggtccacagagctgtttgttccccaggctatgggtgaatatattaaagcatggtttgcccttcacgtgatggcaaaagaatgggggctgggaagccaggacggttttcagttcaatatcagcgtggggtatgatctggcaggaatcaagtcggaaaagatcgatacattcattgaaagcatgaaggaagctaaggatacggatatcttcagggagtgcagacagtggcttctggaccatattgatatgtttgaacggttcacggcagaggatgcggagaaaattccttccgatatctgcaactcggctaccatttccactctgcacggatgtcctccccaggagattgaaagcatagccaattatctgtttacagaaaaacatatgaacacctttatcaagtgcaatcccactcttctgggatatgattttgccagaaaaactatggacgacatgggatatgactatatggtattcggagatttccactttaaagacgatcttcagtatgaagacgctattcccatgttccgccggctgatgaagctgtctgaggaactgggcctggcattcggcgtgaagattaccaacaccttcccagtggatgtaacaaggagtgagcttcccagcgaagaaatgtatatgtcaggaaagtctctctttcctctgtccatctctctggctgcaaagctttccaaagagtttgacgggaaacttcgcattgcctactccggaggagcagattactataatatcggccgaattatcggtgccggtatctggccggttaccgttgcaaccaccctgttaaagccagggggatacaacaggggtacgcagatggcagatctgctcgcaaagcagggcttccggcctttttgcggggtagatgtggatgcactgtcaaagctggcggaggacgcaaagaaagacagccaccatgtgaaggccgcgaaaccgcttcccagcagaaagactaaggagacggttcctcttctggactgttttatggcaccctgtgaggagggatgtcccattcaccaggatatcaccaattatatagcgctggctggagaaggcaagtatgaagaggcgcttcaggttatcctgcggaaaaatcctctgccctttatcaccggtactatctgtgctcataactgtatgggaaaatgcaccagaaatttctacgaagaggccgtcaacatccggggtgtgaaactggaggcagcagagaaggcttatgatgccgttgcctcccggattcagccggtgcctgtaaacggagcggaaaaggttgctgtagtcggaggagggccggcaggcatcgctactgcctatttcctggcacgggaaggcgtgggggttacagtattcgagaaagaggcttctcttggaggtgtggtccgcaatgtaatcccgggattcagaatttccggggaatctattgacaaagacattgccctcattgaaaagctgggagtgactgttaagaccaatgcagagataacttctctggaggaactgaaggctgagggattcacttctattgtgcttgctctgggtgcttccaagcccggaagtctgaagctggagaaaggggaaaccatgaatgccctggaattcctgagagaattcaaggaaaaagacggagatctttcactgggcagaaatgtggttgtcatcggaggcggaaatactgccatggatacagcaagagcggcgaaacgcaccaaaggggtggaacatgtctatttggtataccggagaaccaaacgctatatgccggctgacgaggaagaattagatatggcagaaaaggatggggttatcttcagggagcttctggctcctatatctctggaagacggccagcttctctgtgaaaagatgcagctgggtgccctggatgcatccggccggcagagcgtaagcgggactggggaaaaagaatcggtgccggccgacacagtaattgttgcggtaggcgagaaggtccccacagaattctaccaggctaacgggctgaatacagacgacaggggaaaagcatacagggatgacaaaaccctggaatccagtcagaaggggatctatctggccggtgacggtctcggcggtccggcgactgtagtggagggaatccgggatgcgcagaaggtggctgcggcgatccttagcagtcctgcagtcagtgaatgtgaaaaggaaggctccagggaagaatgttttgccaagaaagggattctggtcagcgaaaacgaggctcctcatgagagcaaacgctgcctgaattgtgccgctgtatgtgaaaactgtgtggatgtatgtccaaaccgggcaaatatatctatccaggtgccgggaatgcctatggcccagattatccacgtggactatatgtgcaatgaatgcggcaactgcaagagtttctgcccatatgccagtgctccttatctggataaattcacattgtttgccaacgagaaggatatggcagacagcaagaaccagggctttgccgtactggacagagaggccggattgtgcagggtaagactgtttgggaacgaagtaacgctgaaagtttctgaagataacgagagaatccccaaaggcctgagagatctcatggcagccgtaataaaagactattcctatttgctgtaaacggggatacaataaaagggacactgcttgctggcagtgtccctgattccatttgagacagaagggaggagacaaatgattataagtgcaagccggcggggaaagaccatgacagatgatggaaagacagcccagctgctgacaaaatggcgtgtcgcttttcctactatttttgtctctctttttttgttttttactatattttttctgtttggttccaagcaggtgattttggtttcgtttttaactctctttttcaagacaaaaagtactcaggattttactttcggggaattgctccaggcttacggaaggatcctgctggcaggtctggcagcctatggggcgacccggaacctccctctctgtattctgctgaacctgctggttccctttctgcttgtatatcttctcacggacaaatttacaccaaaagcctattttgtgtatggaatggcgtttgtctttctgcagctgctgcccataccggcaaagctgcttttggtacgtataggggctctgctgtatgcgttttgttttctgacggcagctttatatcttcacagaaaaatattcagaaaaaagcggcattatggcactgtgcgcagtggaatggcaaatatggcgctgcagctggagaaactttcggaaggaaggagagaccggggggatatggcggatctggtgcagatgatgtaccatatgaatcaggtgatctatgccagcaggaattacaggtatctggctgacggatatggaaagataaattattactttatgattgtctttcagcggttccgctactatatgacagagctgctggatccaaaaaagggtatagcgttcaatgagcaggagtatcacaggcagctggcgagggtcttccggaatgtggaacagcagatgaatgaggcggataatcatgggctgatctcagagatcaattacttccagagtcatgagagactgggagatgagaagctgaatcaggccatggagtttattcttggacttatctgttttgctttaaaggaggtaacttccacagataaagcaaacagggggagggagtggagacggcccagaggcaagacaggaggtccgaaggagtttttgcggaaatttcatccggacagatttcaggtacggtttgccctgaggctgtctgtcgtgctctgtatttcatttgccttttgcaggattacttccctggaacacggctattggtttcctatgagtgcttttttaatgctgatgccatattcagaagaaagtatgctcaagctgaataaccgtatcatcggcactgtgacgggactttttattacctttttcctgaccgagatttttaagtccttctgggggcatatcgggatcatagtggtgatgacctgcctgatgtactatgttccggtaacctcctggacgatgcctatgtacagtacctgctacgggatggccctgactaccttaagcctggatacgggtcaggccattgcgcttcgaatcttatgtgtggggctggctgctgtgaccgtatggctggccaaccgttttattcttccgattactgcaaaatcggaatttctaaaaagcgttaacgatctgcttgatattgatgagaagctggtaggtgaactgcaaaaaagcctgtatgatgaagaggatcccagcctgcttcgggagtatatgatggtctcaaatctcctctctgaggagatccggaattatatgaaggaaaatatgggggaaaatgagaagcagttctatagccggctgctgcccatcaaccgccggctcctctcagagatcgagcagattcatgcgtatttgaagaaatataaggtaagccccagggaaaatcccgccattgaggaacttctcgggaatatggagcaggcgttaaagcggatacgcaggggatttacaaagaatgaactgaacagttttctcacagcaggcagtgagttccgggtctatgggaagctggaagaggagatttatttcaatacactggcgctcaactgcatgaacagtgtcgccagaatctctgaaattttaccgaaaaaaccgccgaataacatatgattgacactcgacagcaacttttgtacaataatgataaaaatggcaggatgggatgatatgtataaaatatttcaagaggcaagtgaaaggctggagtctggacaggatgctgtattagttacgataatagacggatccggttccgcccccagaggcgcgggcgcaaagatgctggtaagtgagaatggggattgcctgggtaccatagggggaggggccgtggaatatgaggctgccaaaaaggcatccgaggtgctgaggagaaaaaaatccctcattttgaactacagtctggcacctggtcaggcggctgatctgggtatgatctgcggaggaaggatcactgtttatttccagtttctctcccgggaagacgccaaagtacgcatgatctgcaggaaactaaaggatatgtgccagggggaggaaggcgcctggatgatcctggagattacgaaagaggaatcctggaacatggggatatatacgaagaaacaagggctttggggaatggaaggatcccttggaaatctcccgcttaaaaaccgggcggtatttctccgggaaaaaagcagatgcctgtacagtgaacccctgctgccgtccggaaaggtgtatgtgtttggcggcgggcatgtagcccaggagacagttccggtgctcagccacctggatttttcctgcgtggttctggacgacagggcggagtttgccagtccagagagatttcccggggccggggaggtactggtttgtgatttttccagaatcggggactacgtcaccattacagaggaagattacgtgattattatgaccaggggccatctgtcagatcttcaggtacaggctcaggtattaaagcggaggccttattatatcggaatcatgggcagccgccggaagattgctgcggttactgaaaaactgctggaacagggatttacagaggaagagattgcaggatgccatatgcctgtaggaaacgatatccaggcagagacaccggcagagatagccattagcattgccggggagctgatacaggagagggccagaagaaaacaggacgtgctgactgatagataaggagaacagcctatggaaaaaaagatacgtaccggcgcggtaattacagccgcaagggctgacttttacaggggggaatttaagcctttgctggaaataggggccctgaccgcagttcagaggctgattttgaccctccggcaggccgggtgttctcccattgtcctggttaccggataccgggcaaaagaccttgaaaaagcagtatctaaaatgggagtcatctgtatgcattacggagaatatgagagtgcccagatgtttgataccatcaaagcaggactggaatatataaaagatctctgcggacaagtgatctgtacccctgtggatcttcccatggtgtcagttcataccctccatcggctgatggatgctaaggctcctctgggggtgcctgtataccaggagagaaaaggccatcccgtccttatcaatacctctgtgatcccggaactgctgtcctatgacggcagccggggattggcaggcgccatgcagtcagcgtcctgcggtcggactctggtgcaggtagaggatgaggggattcttctcagagcaggggaagtccacgggaagaaagaactcctggaagagaggagccgtcagctctatactgcatcggttactgtgaggattatgaaagaacagcagattttcggcccaggtacggcccagcttttgacacttttacagtataccggatctatgaaagaagcctgcaggcagatgaatatgtcctacaccaaaggatggaccatcatcaacagggcggaagaacagcttgggtaccgggtgattcaaagacagcatggggggaaaagcgggggcgccagctttctgactgaagaaggaaattcacttttgcgcagatatgaagagatggaggaggagatacgcaggatggcacagagcgtattccaggaaaagttcccggaatttgctgtggagtaaatgacaaacagtaagagagggcaggggaaatttacaaaaccccctgccctctcttacgctgtcttattccttttccagtacctttacaatctcagagatgtacatggtgtgatagtctttattgggataccatttttcgtccatttcttttgcgataaagttttccggcggcatggtgtcctgatatatttttttgcacactaggatgagatttgcctcctcaaacgcaactgtttcatccacaaaaagaggggtcagtcccgcgtcctttactttgtctgtatctcttccggatacggtgccgcagagattcagggcttttttgtaggacgggtcaaagaatgcaagggtaaatgtgtcattggcatccacaaattccttggtatacctctggggacggatataggtggtcacagtgtccttgccccagaatactcctacaccgccccaactggcggtcatagtattgaatttatctttggtgcctgcagtgatgagcagccattcttttccgattttagtaaagggattaaattgtaattgatctggtgatatctctttgaaactcatataatacctgcctttctgtaatacaaaattaagagaagtctctggttaatagtatagcacggagactgccggttgtcacttggactatagaagatactcctcacaggccctctgcatccacgcagagtctttatagatagccctgcctacaccggccagatctgctttttctgaaaccaaaaggtgatcggcagctctggcatccgtgattccccctgtgagaataacaggaacagatacggcttgttttatgggctgggtcagggaagaaaaataaccctggggctgggcggaggcttccgggatagtgtagccgcagtggcctccggagatatcaagcagggtaacgcctgctttctcaaacatttttgcggctgcaatactgtcctccagtactgtgcctccctccatgtagtcacaggcgcccagacgaagcagaaccggatagtccgggcctacctcacagcggaccgcagtgacaacctccagaggcagacgaaggcggttttccagggttcccccgtattcgtccgtgcggtggttgctgagaggagagtagaattgattcagaaggtatccgtgggcacagtgaatctccaccccgtcaaagccggcggtttttgcccgccgggcggccagttgaaattcttcaattacctgaagcatgtcatctctgttcataaccttgtcagggagaaaccctttgcgtatattcttaatgggagagggggccagggtgggatggagattcagatcaggatcacaggcgcttcctgcatgattaatctgaatgacggctttgctgccgtctttctttatgacatccgccagctgcctcagaccggggagacagtcgtcgctgtgaatccccatctgatgggctgtggctttcccctggggggaaatatagctgtgctctacaatgatcattccgatatagcccccctgagacctctgccggtaataatccagaacgtcctgagtgatggtaccgtcagcctgggatttggcggtggccatgggcggaaagaccaatctgtttcttaacgacagatgcttggtaatgaaaggctcaaatagatgtggcatgttttattcctcctacattatgattgacttgagtattgacactattatagcactaataaaagaaggtttgccagtctaaaggttaaaaagaaggaaaagtgtaaatggagaatcctgttggaaaaggaggaaaattacttcagggataatcctctgtaccggttaaagcaggcaaaaatctcctgccgccttggcatggccaggttggaggggaggtagctgctctcagtgactgcggccagccctttctggcggatgagattctccagaaggtccacgatggttctcaaatctttttttccgtccaaaagattacactccgcatactttatcatgtaacccagggcggcagtctgttcactgtctgccagctgttccaaataccttaaatcaatggtctctttgttcatggatattccgtcttttcccattaccttaatctttacacggctgtttcccttcacggaagagctgtaaccaggcatccgcagaaaagaggggacggcgggaagttttccaggaagggtgagagttggaaacgctttggcctcttcttttgccggttcggttatatccttggggagataccggtccatctgaatcacccggtcggcaatgtggaaaaaggaaccagaactgccggcgacaatcacagaggatattccgtatgcttcgtacaggtggcggactctctcaaggaatggggtgataggctcctgatccctgtgaaccacacgctgcatcagctcatcccggatcataaagttggtggcgctggtatcctcatcgatgagaaacagggaggttcccgcctccatggcttcgatcacattggcagcctgagaggtgctgccgctggcatcttctgtggtgaaggaaacggtgtcttttccgttgggcaggtcattgacaaacagagaaatatccgtttttttaatgctccgcccgtcttccgcccggattttaacggctgtggggtccgtgataacatactctcttccatctcccttaatatgattgtatacccccagttccagcgccttcaagagggttgattttccgtgataaccgccccctacaatgattgtgatgcctttgcgcagtcccattccggaaagagctccccggtggggaagctccagagtgacttccagggacttgggggattggaagggaatcgcctgtctcatgggacggctggagacaccgctttcccttggaagtatggagccatttgccacaaaagcggtgagacccagagaggagagctggctgcggatatattcctggtcctctgccagatggatgacttcggttacctgacgggcattcagcttctgataataaaaggaagaggtgacgcagtcagggagaaaatcatagaggatcttgatgagctctgaggaattaatggttcttccgttagccggaaagcctacctccagatgaaccgtaagagtaccggtcctggggtgaatggtacaggcagtacgctccaggacctcctgcccgcagcggctgaccgatataaggccgcttttgccggagccttttgctttaaagttatatcggtcaattttctgaccaaagatacgtgtgaggtagtcgcagagcgcggtccgcttgtaggacgtgtcaaaaagtccggcagggaagccggcctgtctgccctcgatgaccaggcttaccttggagggagaagcaaagggatctccctgtacgtggtcaatggacagaagatacccggggaactggtagctcccccgggtatctttataggccggataacttttatggttaattgcaagcagcagcgtctttaaatcggttgaatttttcattttcatttcctttcttttcttcctaagtctcgttccattctaaaggaacacgcttttattgtaatagatttgaagaaaagaaacaagagattctcctgtataaataccaggcgcctccccctgcaagaagcgtaaagcagaccgttacaggcagggcccatgaggaaagcaggaaggtaacggcaaggggcggcagaaccatgagcattccggctcctatggttgcaaggactgggagtccctgcttcaccgcgtgatactccgtagcccagtcataccggggatacttcagatccagggcaagaccaaggactgcggtaaagaaggcgtaggcagcaggcgtcaggaaaaagaaaattccggtgaggggatccggccggaagtgtatcacaaagaggatgccggcgatccctgctgctggcagcataagtgtcagatttactcctattttcgccagaaagatggtaccgggcgccacgggggccgtaaaaaggcaccagcgggcctttccctccagagagatagatgcacaggttgtgcagctcataatcataaagagagagatgacaaagggaatagaccgggagaattccaggataattccgtatcctcccagcagatcttgcagctgtccctggtctgtaaagagaaataagacacttaagacaagaagcaaaatctcacccaccgaagtattcagcaggtagatggaggaggacataaggcggcggagctcttttttatatatagcagccagaggcgacgctgtgcccagccgctgcattttgtaggcccctctggtgtgatgagaaaagagggctgtgtttaatttggcaaagctcagggacaaaagcagcaaaaacagtccggtacttcccagggataaaaggacaaaatacaggaaatacaaaatgctgccgtgattcagagcccctgagagaagggcggccgggggatatacggcattcacctgctgtgcggctgcctgtccgatggcggcaaaatcctctgcgttcatattctgcatacggaaggaagcgcccaccaccagcagcactgcccctacacttaaaaggatcgttgccagatttctgtatttaaaccggagtgcagcagacagtatcagagtgcttgccacggcagacagaaccatgggcaggagcggagccagaaagacagatactatcatgataaaccagcccccgggactgctctgatgctccagtccgtatacaatcacggaaggcagcatggcaatggcggaagccgcaagattcataaagtacacggcagtaagcctggataagagcagggcgggaacggggacaggaagtgacattaccatgtcatagtccttcattccaaacagtatcccgtttgtcttcataaaagtaacgattatagtgaggacagcactgaccatcagcgtaagggagggaagaagatctgtcatccccatctgttggcagccataagctatggcaatactgtagaaggtacccatcaaaaacaggacgccgtagacagctcccatcaggatacagtttctcctgtcttttttgtccgtggaatggaggaaacggttgaatccaaaggaggagagaagctgaaccttgagcaaaaccttatagctattcatcttttgccacctccagaaatacttcttccaggctgctgctgccacgaatctcttcggttgcgccgctggcaatgagactgccgttttttattatggctatcttattgcatagcttctcagccacctccagaacgtgtgtggagaaaaagattgcgcttcccttgtcacacagctctttcatgatgtttttcaggtggtaggaagcctgaggatccaggcctacaaagggttcatccagtatcaggaggcgtgggtcgtggattagggcagatataatggccagcttttgcttcatcccgtgagagtaggaggaaattaagtcgcccagatgatccgtcagccccagaagatcagagtatttgcggatacgtgcttccttctgtgcggcagacacctgaaaaatgtcgccgatataagtaagatactgaatccctgtgagatattcgtagagatccgggttatcgggaatgtacgcgatctctgatttgcagagaatgggttctttctgaatggaatggccgcagatcaatatctctccctcacggaattccagaatgcctgctacggcccggatggtagttgtctttcctgccccgttatgcccgatgaatccatagatatctcctgcctgaaccgaaaggctcagatcgcttaccgctttcttccccttctggtaggatttggaaaaattccggattaccagaatatctttttctgttctttgtctttgcattgaggtcaccttctttactagtttgtgcttctattgtaaagcccgggactcccgggaacaagggagcagaagttgacttcaggctgtctaaatcaaccagggcgatacttgggaaatgctggacagaggggggaatatcaggtatgctgaaactatgagaaggaaaggagaaattagtgtgaagataacagcagacgaaacagttgccattgtgatagactatcaggagaggttaatgcctgtgatggcaaagagagagaagctgacagcggcgtcagacattttgctgagggggctgagagtgctggacatccctctttttataacccagcagtataccaaaggattgggaacgacagtaggggagatcacagaggcagccggcacagaacagtatacggaaaagataagcttcagtgcgtatgaagcagtccttccctatattcaggggaaaaaatatgtcatactctgcggtattgaggcacatatctgtgtccttcagacgcttttggaccttacggccaatgggtatgttcccgttcttgtgacagactgtatatcctccagaaagccggaggataaagccatagccctcaggcgggctgaggcggaaggcgcagtattaaccacttgtgaatccgtcttgtttgagctgctcgtcagggcaggaacagaaaaaagcaaaaagatacagaaactggtgaagtagaaaaaggggttcggggaatataaatttttcgttaatcttttataaatgtctccactccccctaaattttatggtatactccttctaaaaattatttttaggaggagtattttttatggacgcagaccctgacgggaactctattatgtttcagctgctgtttcttgtatttctgacactggtgaatgccttttttgccggagcggagatggcagtggtctctgtaaacaagaataagattaaggtattggccgaggagggcagcaaaaaggcaatgcttgtgcagaccctttttgaagattccaccaaattcctgtctaccatacaggtggcgattacctttgctggctttctttccagtgcttccgcggctacgggcatctcgcagcttcttggtgagtggctgaaacagtttgggattccttacagcgggaccattgcagttgtggcatttaccatactgttgtcttattttaatcttgtcttcggagaactggttcccaaacggattgctttacagaaagcagaagagttcagtatgatgacggtaaagccgatttatattatttccaggatcctgtccccatttatcaaattattgtcgctgtccaccaacggcgtgctccgtctggctgggatgaagaccgatcatctggaggaggcagtaacggaggaagagatcaaagccatgctggaaatgggaagcgaggcaggggttttcaataaagaagagagggatatgattaattcagtcttttcttttgacgataaactggccagggatgttatgattcccagaagggacgtatttgctatcgatctgagcgaaccatttgaggcatatattgatgaggtactggagagccgtcattccaggattcctgtctatgaagaaagtattgataatattgtaggaatcctacatatgaaagatttcatgatagagatgcacaaaacggcatggtcggatctggacatcagagcactgatccaccctgcgttctttgttccggacagtaaaaacacagacgaactgttccgggaaatgcagaggaacagggatcacatggcagtcttgatcgatgaatacggaggattttccggcattgtcaccattgaagatcttgtggaagaaatcatgggagatatcaatgatgagtatgatatggtaactccggatatagaaaaaatagaggatgacacttatcgcctggacggaggtgttctggttgaggagatcaatgaacagctgcatctggacttgaaaacagagaattatgacaccttgtccgggtttctcattgagactcttggatatattccagacgggaagaatgagagtgttgctttggagtctgtaaagtttatcatagaaaagatggaagggaaacggattcgctctgtggtgctgaaggtagagcatccggatttttgacagtgacagaagtgtaaaaatgtgatggaacaggagatacccggcagccgcgctgtaactcgaaggagatacagcgcggctgctctattgcagggcaggagcatccaataaccgaaatccccattataggaatgggattcaaaatatgatatactatgtgtgcctgccgcactgtgcaggctgtataagtaagcagaaggcgagaggtgctgtatggataaaatactaattatagaagatgatgaaatgttaaatgcaggtgtgtgctttcacctggagaaagggggaaggcagcccgtgccagcatacgatctaaagaccgcagaagcagtacttaagaaagataccattgcactgattctgctggatgtaaatcttcctgacggggatgggatttcttttgcccgtaaaataagagaaaaaacgaatacccccattatattcctgacggctcaggatatggatgaggatatgatccggggatttgaggcaggtgcggatgattatattacgaaaccttttaatattaagatattgatgcagaggatggaggcaatcctgcgcagatgcaggaaagaagagaaaaacatggtttactgctgcaaaaatcttcaggtagattttgcctctatgaccgtaagaaaggggggaaagcccctcacactcacccccacagagttcaagcttctgcaggctttctgcagaaatccggggcaggtgcttacccgtgaaatgctgctggataagctatgggacagtgaagggaattttgtggatgagcacactctgaccatcaatatcagccgcctcagatccaagatttcagatgagaagaattcatacataaaaactatatacggtatgggataccagtggacggagggagaagatgagtaagaaacgatcaggagagacggtctgttactggagtgtatttgctttgataatggcagcttttttgtgtactgtttttttgagagccaaagtctggagcgtggaaaggatacaggtaagctgtgtgggttttgcgctggccatggctgtgatggtgttccttggatatcggatgcacaggagaatctatctggaactgacgggccgtatttgcagctgcgtggatgatttgattgcgggaaaagaaccgcagatcaaccgggaggaagaacggatttcttccaaaatagccgcaaagctggagaccttggctgagattacccgccataccgtagaggaaagcaatgggaaaaagacagaagtgcagcagattatctccgatatctctcaccagctgaaaacccccattgccaatatcctgatgtacacggataccatacgggactgtgagctgcccagagaggaggaagtaaagttcctggaggttctgcaccaacaagtaagaaaactggaatttctggtgcaggccctgattaaaatgtcgcgtctggagagcaatctgatcgttctgaaaaagtcagagggggatttataccataccctggccagggcagtggcggcagtaaccctgtcggcacaggaaaaaaatctaactgttaaagcagagtgcagggaaggaatacgcctgtggcacgatcccaagtggaccgaggaggctgtttttaatgtgctggataatgctgtcaaatatacgccggagggaggaaccataaccatctccatgtgtcagtggcagatctacaccaagatcagtatccgggatacgggcatcgggatagatccggagcacaggaacgatatctttaaacggttttaccgggaaaacaaggtacatgaggcaaagggaatcggtgtgggtctttatcttgcccggaagattatttctctccagggaggatacgtaagcgtccgctcaaaaccgggggagggtacagaattctcgctgtatctacccaatgatcaacgatgaatgtttcagaattgataccattttctttttctgtgagagggttttgcaacaattgcgtgataggataagactatagaaaaacgaaggaaatgaggaaggtatcatgagtatattaaaggttgaaaacttaaaaaaatattatggttctggggaatctcaggtgaaagccctggatggggtgaatctggaagtagaaaaagggagctttactgcaattgtgggaacttcggggagcggcaaatccaccctccttcatatgatggggggacttgatgtgcccaccagcggaagtgttgaagtggcagaacgtgagatatcccagatgagcgacgatgagctaacgattttccgccgccggcagatcgggtttgtgtttcaggcttataatcttgtccctatactgaacgcctatgaaaatattgtgcttcctattcagctggacggaagtaaagtagataaggatttcgtcatggatgtagtgggaattatgggcattgagaaaaagctgaaaagcatgcccaatcagctgtcaggcggggagcagcagcgtgtggcaatcgccagggcgctggcagccaaacctgcaatcctactggcggatgaacctacaggaaatctggatacccgcaccagtcaggatgttctcggacttctgaaaacaaccggggagcggtttgggcagaccattgttatgattacccataatgaagagattgcgcagcttgcagataccattatccgtatcgaggatggaaaaatcgcagaaagcaggtggcagtaatgaagatggatcagaacaacaatggggctgtgataagacagattgcaaagaaaagccttgcgggcagcagaaccagaaatatattcacctgtcttaccatagccatgggagtggccctggtactcacctttgtattatatctttttggaaattcaaagcagcagcttaggacccaggaagagacaccccaggtatcttatatggacatcaccccggagcaggcggaacagttaaaagggtttcctgagataaaatggctgggcttatccaagagtgtgggaagcggtaaagtgggcagcaaccgtttgggcgtaacctatcaggatgagattatgatggaaaaaaatgaaatctcttatactggcgagcttccccaaaaggacggggagattatggtaccccgggactacctgacgcagctgggcctgaaaatccggccaggtgatacggtctccctggatctgggagataacacagaaagagaatataaggttacgggaattgtggataccccatctaagaccagcaataaccacaggatctatgtctcactgccctgcgcgattgctcttaccggagatgaagaaagtcttctggatgccacggtgaatctgaaccaggcagtaaatatgacattccctcaggcagaggagactgcggcagcgctgggtgagaaggcagggctgacccaggaacagattaaagtcagcgaggcattctttaatcaggcaggcatatccagacttacgatgaacagtgtggcggctttggcccttgtggcaattcttatcttagcggcagcagggctggtaatccataatattttctatatcgctgtggcaggaaaggtgagagagtacggacagatgaggaccctgggtatgaccagaaaacaggtcagggccctggtgtcccgggaggggactgcactggctgcaaagggcatacctctgggacttatcatcggagctgttatgggatatgtgctgatacccggcggctgggactggaagaccactcttggtgggatggctgtgtgtgccgtgttagggcttgcagccgtgcgtatatctgtgagcaagccgggaaagatcgcagctaaaacagcaccagttgaggccatcagttatacaggctattcccagaaccagggttcatccaaaaaaaggtattcctatctgaccccagggaatctggcggtcctgaatctgaagagaagcaaaaagaaatcccttctgaccttgtgctctcttgtgcttgccggtgttctgctgggggccatcagcagctttgtgatttcctacaatccaggcgcttctgtagaatcctcttttcccaacggggattaccagcttcagctctctgcggaatccgggtttggcaatcaggatctcagtgaagaagggagaatgaagcagtatgcagcgctgcagagcagcggtatcatcggtaatgagacgagaaaagaagtggaggggatcgacggcgtaactgcgacccgtccctggcgatatctgaatgtaagtacggatctttttcagaaggagacaaatttggggatcaatgggttcagtgaggatgaatttgaatgggtgaagcagatgggttatgacggccctcagacatatgaggagcttatgagccagccgggattgattgttgagaccgagagcaacaggaactttaaagagtttccggtaaaaagaggggatatgattcatgttgtcacttataacggcaggggagaacgattggaaaaagatttcccggtagtgggtacttttcactatatatcctggatgatggatcacagaaaggagaataaaaagctgcctataaccattatgggaagtacgctgctgatgccgtcggaaatccttgatgactgggccggcatggataccacctatgggtttgagattgagacagaccctgccaagagcggggaagtaggggaaacgctggaaaagctgtacggcaccgaggagaacctgtttctcaattcaaagacagaaaacatggcatatctggaccagatgtttttgccggcaaagattattctctttgttcttgccggattcctggtagtgtttggagtgattaacctgatgaataccgtactgacgaatctgtttaccagaaagagggagctgggaatctttcaggcagtggggatgaccagggagcagatgagaaagatgctgggcagagaaagtctcatctatgtggcagctaccattgtctgtacgctgacctttgggggattgctgggatatgggctggtcgacgccctggatcagatgggaatgagtgtcaaataccagtacccgtggattccggttcttctgtttgtagctgtactaggcgctatgcaggcaggcttgacacggtacggagttcagatgctgcagaaggagaccctctctgagagaatgagaaaggcggactaacggacagaccaaagagcagttaaaattgaaaagacacctcaggctgagaatgcaatttcctgtgcctgaggtgtcttttatgattacagtactctgttcagttccctgagcagtgtagtgatatccagcggttttataagatagcctgacatacaggcggcatacgcttcttttttatcttcctcaaaggcattggctgtcatggcgagaataggcaatgtggaggaatcactgcggttcattgtccggattgcttttgtggcctcaaggccgtccataacaggcattcggatatccatcaggattgcctgataggtaccgggggggtggctctggtaagcgtccacagcttcttttccgttggaggccacgtctactgcggccccatgaagctccagcagtgttttggctatttcctgattcagctcattatcctcaaccagaagaatccgccggccctccaatggggagtcagaggcctctttgggggccatatcttttttatccaattgtgaaagcgtatcaaagatggaagagcgcagcagcggcttggcaagaaaataatctatcccggcctctctggcctcctgctcgatttcgatccagctgtatgctgtgatcataataatcattgtatccgggccaaccatgcggcgaatacgccgtgcagtctcaatcccgtccatgccgggcattttccagtcgatcatagcaatgtcaaacacccggtgctcttccaggcttttgctcacttcttcgattgcctcaaagccggatgcggcccagaccgttttggccccgatatccgccagaatgaaagcagtctgctttcccacggaagggtcgtcgtctgccactaacacgtgaaaccctttcaggagattctgacgcttccggttccactctttttcagcgtcatcagaaaccagctggaaggggatcgtaaccgtaaatttacttccctctgccttagtgctctctgcctttacttctcctcccataagctgagccaggttatagacgatagaaaggcccagtccgctgcccacgttgttccgtgcgctgccaggggattcctgttcaaatggctggaacatccgtttcatgaactcttctgacatgccgattcccgtatcgctgactgtaaactgcagataggcaaacccgttggtccgtctttcttcttctacatctatggtgattttccctccggagggggtaaactttaatgcatttgagagaagattcatcaatatttgcttcatgcgcagggaatcaccgatataatgagcatccaaaggctcctggtgccgcatttcataagagatccccttttcgacagtctgggagtatatgagaccgttcacttcatccagaaatgccttaaagctaaaaagttctctggcgatctccatcttatcggtttcaattttggacatgtccagtatatcgttgatcagagagagcagatattgggaggaggcatcaattcttctaaaacagtcctgaacgacttttttatcctccagcttcagttgcccgatggtactcataccgatgatggcattcataggtgtgcggatatcatggctcatgcgggacagaaagtcagatttggcatgactggcggctttggcagaggcaagagcatcccggagaagctgctcctgacgtgccttctccctcctctgggaatccagaaccttaaccaaatcaatggcaaggatgtcgtcgttgaaggggttctctaccttgatcatatggacagatatccagtggtagatgccgtctgcatctttttgctgaagctccatgtatacttcctgctctcccgcagtgaagcgtcttataagctcttccctgcaaaaggtagcggcaaaatcactctgataggaagcataaatatcgggaaggctgctgtttatcatgtcagtgtacagaccttcttttggtgtggaatagccattctggctgtaagaaaagcggctgtatgtattcttggtcagattaaggctcattatttgaggataggccgtatgaatagcagccctaagaaaccggttctccaaaacccgttcctgctcctgagctttctccagggatacctgctcagtgatatctgtaatcaccgcctgtatgacctccagaccgtcactgttaataatccttctcataacagcattgatccaagcttcctccccgtttttcctataacatctccttcggtaggttcccgcctccccgttcagcgtcagctcttctattatagaggcgatacgtgtatagtcctcggattccgcctccagaagagggctttttgccctatggcggaattcctcttccgaggagtacccataaattttccaggccataggattagcggatatcacttcgtgatccggtttggtggcaaactgtataatcccgcagggaatggtattgtacagatgttccagaaactgggcctgctgttcgtattccaggctttttgcgttcagagccagctgcagacgctggtattcctcccggccggcctcaacaggaaataattcgtcatctttaatggcagcataagggactgagttgtggatatgtacggtttctaaggcttcccctttctcccggaagataaaggttacccgctgccagacatctaaatacgcctcacaccccggtttgctccgcagccggctgacgccttcgcagagataggagcctccgcccagatccaaagagtgatattcctcatcagacatatcacaggcaatcatatcatcttttcccatgcgaaagcaggcttctaccgcatccctgccttctgctttctgcttttcccctccacccagccatatgatatcatccgcaaaagtggagatcataaattccagatcagagtcgcagaaataggtttttaatatttttccggccagcgcttccacttccggcagtgtcttttttcccatgatagcttcctctctatccttctaacaatttcttaaatcataacatagttagatctctaaagaaagcttttcttagcagaagagaggaggatatcaggggcagaattaagtaatttttaagagcttactaagagaataggatcaaatgcattccttgtctgtgctttaattgttatagataggaggaagtagttatgacgagaaaaagaagaaagagacgaagagggatgaagaggctggggaatctggccgcagtttttctgctgttggttcttttgcttctgcttctgccggccagcaggcagatggaagggcttgtgtcagggaaaaccggattagacagcgccgcaccaggggaagtattacagatagatgtaaaaagtccgaatgcagtcttactcagaagagaggacggccggatattgtttcaaaaaggcggcggggagaagatctatccggcttctcttaccaaaatcatgacagtgcttacagcaatagaacagctcccggatttggacgaggagattctcctcccggcagagcttttcgacccgctgtacgcccagggggcgtctatggcgggcttccagccgggggaacaggtgaaagccagagatcttctctacggagccatgcttccaagcggcgcggagtgctgtgtgggggtggccgaaaaaatagccggatccgaggaggaatttgccgcattgatgaataaaaaagcagaaaaattagggatgaagcatacacactttaccaataccaccgggcttccggatgagaaccattattctacggcagaggatattgcctgtcttctggacaatgccctaaaaaacaatacgttccgggagatttttacctcctccagatactccacgggaggaaccaatctgcatccggagggcatcactttttacagtacgctctctcagagtctggaggacccgacatttccggggggagtaatcgaaggcggcaagaccgggtatacccaggaggcagggctttgcctggccagtctggcagagaaggacggaagggaatatatctttgtatctgcgaaaggggaggggaaccatcagacagaaccggtgcatgtggaggatgcactgtacgcatataaagcgatcccggcttccggtgaaggaacagattaatcccttcatttctgcagaaaatcctggaaatgatacaattttgatacatctttgaggtataatggatacaaatgatacaggggagaaaaagatgatcaaaatactgattgtggaagacgaagaaccaatttcgaatcttatacggataaatcttagaaaggcggggtacctgtgtgactgcgcctttgacggtctggaggcggcggaccgaatggcggaagggggatatgatctgatccttttagatatcatgctgcctaagattgatgggtacgaattgctggaatatgccaagacactggaccttcctgtgatttttattacagctatgggaaccctgaaccataaggtgaaggggctccgccagggagcggacgattatatcacaaagccttttgagatcgtagagcttctggcccgtgtggagagcactctccgaaggtatcacaaggcccagaagataatacggatcctggatgtggagattgatgtgccttcccggatcgtaagacagaacaaggagcaggtgcttctcactctgaaagagtttgaactgctgctgctctttgtgagaaacaaaaatgtagcgctttaccgggagaccatctatgaaaatgtatgggagagcagttatctgggagacagcagaacggtggatctccacgtacagcggctgcggaaaaaactgggttgggaaaagcatatagtgtctgtgtataaagtgggataccgattggaggcatagatgaaattccgttggaagatctttttcattttcatatccttcattactctgattttcagtatcttcggggcgtggatggtaaatgctacctttcagacctctctggagagggaaattgaccggggaaagtctgagaaccagatgtttcagttcgcttttgagatggccctggattctcttggagaagaatatgttgtgatgcaggacagcgtattccaggatatctccaactctatgagggacgggagtgcggggggagagagttttatccgggtgtatgacagagaggcaaagctgctgtttgacaatacaggcatggaaacagatatggactttatctccagtctggacggggcggcagggggctatcaaatctaccatgatccaggggagagaaacgacgggtattatctggcagtcatatgcagggccggagaaaaggaaagtcctttttatctggaaaatattatggatatttcatatatttacagggaaagagaagctctgtttgccagataccgcatagccattctggttcttttggttctcaccgggtgtgtaaccctgattctctctcagctgctcaccagatccgtggtatccctgtcccgaatcaccaggcggtttgccaagggggactatcagatccgggccaggcattacggaggggatgagattggagagctgactaaggactttaacagtatggcggacaagctgtccagaaaaattgaggagcttcaggaggcagccagaaaacaggaggactttacggcttcttttgcccatgagctgaagactccgctcacttccattatcggctatgccgatatgctccgtatgatggatctgaaccgggaggagatcatggaggcatccaactacatttattcccagggaaagcgcctggagagcctgtctttaaaactgctggagcttatcgtgaccgataaccaggatcaggagcttcgattactctctgtaaagcctcttttggaggaggctggacgggtagtggcggcatccctggcggaaaaaaagattcatctggaggaggacatagaggagggggaggtcaaaggggacagagatcttctcatgtccctgttcataaatctgatggataattccagaaaagcgctgaaagcaggaggcataatatccctctggggcaggagccggggagagggttacgaagtctgcgtccgggataatggctgcggtattcctaaggaggagctcagccggattacagaggccttctatatggtagacaaatcccgttccagaaaacaggggggagcagggctggggctgactctttgcagcagaattgtatatctgcacggagccagatgggagattcagagtgatcagggcaaggggacatctatctctatcttctttcccggaaaggaggaactcaatgcatagagggcgatggaaatatgtcttcagctttctgctggtctgtatgctggtgatcacagctatctttcttccccaggcgtactcaaggctgtgggacggcaaatatcaggaacatgtcaccctgttttccagagaacaaagtctcatctcccatgaatatgatacctccatagagcagaaaataaagatactgacccgggaggagagcggcggtgaacccctccggccggtccgccagacaagagaaaatgcggtcagccaggaaaagcttgtggaaaagctgaccgaagagctgaaacagatgtcagcaaacagtatgacagacaggatgctatcctacgatctgcaagactgctttcagtcggcacagctttatagcgtaaaggatagctctgacacagaaaattcaggagacagtgtattattctggcagctgaagttcgagaacagcgacggcttttacggggaagtatgcctcgatgcatatacctataccatatactgcataaatgttctccagaggatttcttattccagggagatgctggagaattaccgaatatctgcaacggatgcgtccaggtcggagtctatggtggattatgaggaaatctttgaaagtattcaggcatatgccaccgactacctaaaggtagaggagggatcctggaatgctgtggggatggaaacagaggtttggatgcatgcggttctggggcaaacgaaatttgacatcaaaagcaggcagacctttgatgacaggggattttatgcccagcttgggctcggcagtatgctggactggacagacagcaataccacagaagaaaaatgatacaactatgatacaaaaaataaacgttttcgatgcaagagaggcttatcctttaagtcagagaagagacataagaggaggaatgctgcatgagaagaaaattatactaccatttttcgatagttatcatagcaggcctctgcgttcttggatgctctccaaaaaaaagccgggatgtgtcaacctctcaggccgaaggagagaccatacaggaagcggaggcggaagctgaaggggcttccaaatcagtaaataaggaggacccgctgctgcttcttgtgaacaaggatacaccgctgcccaaggattacgatcctgagctgaaagtgctcaacagcggcaataaaagcgttgccgaagtgatttataacgatctgcgggatatgctgacggcggggaatgcccagggactgagcttctgcattgcatcgggttacagaagttcggagaggcagcaggagattctggatcaggatatccggaaattaacagcaaaaggtatggattatgatactgcttatcaaaatgtaacaagaacggtaatgcctgcagggtacagcgaacatgaaaccggtctggcagtggatattacggctctctccaatcaaatgctggacgagacgcaggtggatacgccggaaaaccggtggctgagggaaaactgcagcaaatacggctttattctccggtatccagagggcaaggaggagataaccaagattgactatgagccctggcatttccgttatgtgggaaaggaggcagccagagagattacggagaggcagataaccttggaggaatatctgaaatagaaaaaaggggaggtttcattcaatgaagataagacaaagacttagaattatggaaagcaataatcaaaaggacctgaagattaaactgttttttctggcagatcagatgggcctgtccggctggattcaacatgaagcggagggaatcgtagctgcggagattcagggggaagaagagtgcctgaatctgtatctggagcagagtatggcgctttaccatatatcaaaggaccgacttatctgtggaccggcaaaaaaaggggaggcagcccgggagggactgaaaatcggatagagatcacaaaggggtttggactgtctgccattgcagctgtccaaaccctcttttaagtaagagaggctttatttatgaatcagagttcccgtctcccctgcaattccgtcttttgctttctccagcagagtaatcagagccgtgcgcccttccttggaggatgcaaaatcaatggcagcctgtaccttaggcagcatagaaccaggggcgaactgcccctcctccgcgtactgaagggcctgttctaccttcagatccgataaccattcctggttctctttcccaaagttaatggcaactttttctactgcagtcagaatgatcagatagtcggcatccagttccttggcaagcagacagctggcaaagtctttgtctataaccgcactggcgcctttgagatggttgccctgaagggtcacagggatcccgccgccgccgcaggcgataaccacttcaccggattccaccagggagcgtatggccttgatctccacaatttcttttggcttgggagacgccacaaaacggcggtagccccttccggcatcttcccgcataatatggccgtatttggaggcaacggtatcggcctcctcctttgtgagaaattttccgataggtttggaagggttcaaaaaggcaggatcctccgcgtcaacccggacctgcgttaccatggtggacacaggaatgtccttgatgctgcgattcaaaagctcttctctcagtgcgttctgcagatcatagccaatgtaggcctgactcatggccacacacacggagagaggggtgttgggctgtgcagggtcttccctggaaagggctgccatggcattgttaatcattcctacctgcggcccgttcccgtgggccacgataacctgatgtccttcttcgatgaggtcgacaatggcctttgccgtgatcttaacggcagccatctgttccggcagggtatttcccagggcattgccgcccaatgcgataacgattctttttttgttcattgtaaattccccctaaaaatagattgagcccgggacaactatgcgcgccgcacaaccgcccgggcagtttttacttatttaaagactctcggtgtgcctttttcttccagttttttcaatacatctgccggatctgcgaatttactcagcataatcatagcggcgataacatatggcttaaagcttgcttctttgtaaagaggtgtcctgtagcggtcaaatacggttgcgtcaacttcgccggtctcgcagcttacgccggtgatatcggcaggcaggcagtggagataaagcgcttttccgtcctttgtggtcttcatcagctcttcggtgcaagcccagtctttgtgctgtgcgttttgtgccaggagttctttttccagcttatcaatgccgtcaaagtccccttcaccgtaaagattggtgcgtttttccatggctgcaaaaggcgcccagctcttgggatatacaatatcagcgtctttgaaggcttcttccatgctgttggttctcttgaaggaaccgccggatttctcggcattttttctggcaacttcttctacttctggcattacctcatacccttccggatgagccaggacaacttccatacccatacgggtcatcagaccgatgacaccctggggaacagagagcggttttccgtaagaaggagagtacgcccatgtcatcgcaagcttctttccttttaaattctcaatgccgccgaattcatggataatgtggagcatatccgccatacactgggtgggatggtcaatgtcgcactgtaagtttactaaggtaggacgctgttctaagataccgtctctgtgaccttcttctactgaatcagctacctcatgcatgtaggcatttcccttgccgatatacatatcgtcacggataccgataacatctgccatgaaggagatcatgttagcggtctcacgtacggtttctccgtgtgccacctgagatttgccctcgtccagatcctgtacctccagtcctaataagttacaggctgaggcaaaagaaaaacgggtgcgtgtggagttgtcacggaataaagagattccaaggccgctctcaaagacctttgtagagatgttattttctctcataaagcggagtgcgtcagctactgtccagacagcctcaagttcttcatcggtcttttcccaggtgaggaagaagtcattgttgtacatttccttgaaatttaatttatttaatttatcgatataatcctgtaaagttttcataatgggcgtaatcctttcttttatataaatagttggtagttagagactcattccctgttatgccaaatagggcagaaaaaggagggcaggacaggaaatgagtatagttgccgaacgtaacggataggtctgttatttgcagtagcaggcaggaagagcagcatatacagcagcgcagcataccaggtcagctttccaggtcttttcattgggagcgtgtgcctgggcttctgctccgggtccgaatccgatgcaggggatcccgtttcttcccatgatggacacaccgttggtagagaaggtccatttgtctgttagaggacggacttttctcatgtcagctgtctcggcagtaccgatgcggctgtcaccgtacaggcctttgtaagcttcttccagggctttggttacctcatgatcctccgggattacccaagttgggaagtagcactcgatagggtataccagtccggtataggaaggccgctcgtaattgtacatagatacctttacatcatccccgtatttctgaacacttgggagtgcgcggatttcatccaggcagctttcccaggtttctccggctgtcatacggcggtccagggaaacggaacagctgtcggctaccgcacagcggcttggggaggtaaagaatatctctgaggtagtaatggtaccccggccaaggaaacgggcctctttccaatctttgttgtatgcttcgtccagcatcttaaccagacctttcacctctgtgccttcctctgcgtcattttcattaagcgcacgcacgtcctgcaggatgtcagccattttgtagatggcgttgtcgccccgctccggagcagaaccgtggcaggaaacgccctgcacatccacgcggatctccatacgtccccgctgtccccggtagataccgccgtctgtaggctctgtggatacaacgaattcgggacgtaccttaccttcattgatgatatactgccagcagagtccgtcacagtcttcttcctgaaccgtgcctgtaaccactaccctgtatttatcatttaacatgcccagatctttcatgattttagcaccgtataccgcagagacaataccgcctaactggtctgaggtgccccggcctccgatttcggtatcggattcaaagccttcgtaggggtcaaactcccagttgtctctgttgcccacaccaacagtatcaatatgagcgtcataaccgattaaagtttttccggttcccatatagcctaatacattgcccatagggtcaatgtcaaccttgtcgaatccaaccgctctcatttcctctgcaattcggtcgatgtgtcccttttcatcggcactttctccggggatgcgcaccaaatcgcgcaaaaactttgtcatctgcccttcgtaaccctgtgcggcttctttgattttgttatagtccatggtaatatcctcctaatccttatatatgtttgcttgtttcctggtttgcgtgatcactgtctattcgtactgcttgccgccccacacaatttctttgtagcggtccgggtcagtatccccctctgtggagaacatgagaaccctggagttctcatccagtgcaaggaattctctcagctctttgtattcatccatctgcatgacagaagcgatgactcccattcccacagcgccggattccccggagactacctggggatctcctttgaagggggcagccagcatacgcatacctttggctgatacccagtcagggcaggagaggaaagctgtcacgtggttcttcagaatatcccaggagatggtattgggttccccgcaggcaagaccggccataatggtctgcatatccccatccacaaatcgaacgctgccgtctttggcaacagctcccttgtagaggcagtcagctacggaagcctccataacaataaccttggggggattctccgggtatctgttggcaaaatagccctgcacagcccctgccagggagcccacgccggcctgtatgaatacgtgagtggggcgttcacagccatattcatgaagctgttcgtctgcctccatagccatagtcccgtaaccctgcataatccatgaggggatttcttcgtagccgtcccaggcggtatcctgaaccataacgccgttaggggttttttcggccagggcattggccatgcggacacattcgtcgtagttaacttcttctatggtagcctgggcattctctttccgaatgttttccagacgggtcctggtggaaccttttggcatcagtacaacggatttctgtcctaatttgttggctgcccatgcaaccccccggccgtgattgccgtctgtggcagtgaaaaaggttgcctggccgaactcttttctcagttcctctgaagtgagaacattgtaaggaagtgcggagacatctcttcctgtctgttttgctatgtaacgggccatggcgaaggagccgcccagtactttgaaggcattcagcccgaagcggtaggactcatcctttacgtacagctctttgattcccagatagtctgccatgtgctgcaggcgggcaaggggtgtctgggaatactggggaaagctctcgtgaaaggttcttgccttcactacgttttccagagacatgacagacagctgtgtgtcatctgtcttcggcatctcattgggtgtccatttcatttgttccattgtaaaaatccctcctaaaatatttttgctgcatcggttatgctacttgtttacatcggtataactatataaagtatatttggaaataccaaaataattagcaaccttatccccggatttggtaatcaaaaatgcaccggagtcattcagaaactgaatggcctttactttgtcttcctttgtcataagagccaccggtttgcccacaagggccacggattcttcgatgagctgatccagcagatcgttgacatttctggtgatctctgtggtttttgcctccgtatcctttccctgagtgtctgtaaaggagtggatggcggtttccaccatcataagctttgtaatatcatagttaatagagaaaatgtagtggatgacttcatgttcatcccggatatagaaggtggaggattttaaaatcctgccgtcggatgtcttcgtgagatagccggcacggtcttccagtgagtcgggatcctgtttgagcgcttttagtactacgttggatgggccgtcgcccagcttgcggtttgtgatatgtccgttttccaggtatacaattgagtgctccagatcctgggtttttaagtcgtgaattacaatttcacagtctgagccgaactgctgggccagcccatgtgcaatttgtttcagtaaggtcagtcgccccataataaactcctttctctgtgctgccagacgttgtttataagtccatcataacacacttttttcaaattacaagagttttttacaaaaaaatttaggcaatctaaaacttttttgattttctttcccggaagtattgctatttaaataatcaggtggtatatttaaggcatcataagtaagaaataaaaccaaagaagagggtatttacatgcgggagagagtcttaaaactagtgataacttttcatacaacagcacatgctatggctatggagcaaagatgcagggagcggaatcttccgggaaggctgatacctgtgcccagggctatctcggcaggctgcggaatctcctggtgtgcagacatcagtgacagacaggcgttggaggaatttctgaaggacagccagattgaggcagaaggggtttacgaaacattagtataggcagtaaggtattgggaggttaaagaatgtttacatttaaagtgaatggaaaggaatgtcagagcagccgggacgggaggctgattgactatctgagagacgaactgagactgacagcagtgaaagaggggtgcagcgagggaacctgcggaacctgtaccgtaattgtagacggaaaaaaagggaaggcttgtatcctgaagctgtcaaagcttgagggaaaaagcattactaccgtggagggaatcccggaggaagagatgaaggtatatgtccactgctttgcggaagcgggggcggttcagtgcggcttttgtattccgggtatgatcatctccgctaaggtccttttggatgccaatctgaatcctacccgggaagaggtaaaaaaggccatacacgggaacatctgccggtgcaccggctaccagaagattgaggatgctatcctcatggcagcagaatatttcagagaaaaacgtataattccggaggatccggagcatctgggtcttacccagcggtttaaacgggtggatgtggaggaaaaggtcagggggaccggggaatttgttgacgatattatacttccggatatggcctatgcaaaagcgcttcggagtccttatcccagagcccgtattcacaagattgatatcacccgggcgctggctcacgaggactgcgtggctgtgtataccgccaaagatgttccaaataatgtctgcggacatattgttcaggactgggatgttctgattccagagggaggaattaccaggtatatcggagatgccattgcgctggcggttgtgaatcataaggaaaatctggaggaagtgctttctctgatccaggtggatgcagaagagcttgttccggtaacgaatcccatagatgccttaaaagagggcgccccaaaggtacatgagggcggcaaccttctgacaaagaaggtgtgtaaaagaggggatgcagagggcgccattgccggctcaaaatatgtggtaacccgtcattacagcgtaccctttacagatcatgcttttatggaaccggaatgcgccattgcatttcccgagggggaggacggcgtacatctttacacagccggacagtctgtgtatgatgaacagcatgagatttcaagtattttgaagctccctgcggaaaaggtgattgtggagagcaagctggtgggcggaggcttcgggggaaaagaagatatgagtgtccagcaccatgcggctctagcggcgtggcttgccaaacgtccggtaaaggtgaagttttccagaaaggaaagccttttggtgcatgtaaaacgccatgcgatggagatggattttaccactgcctgtgatgagaatggatatctcacagggatgaaggcagtgctttattctgacaccggcgcatatgcttccttaggcggaccggtactggaacgggcgtgcacacacgcggctgggccttataattaccagaatgtggatattgtgggatacggggtttataccaacaatattccggcgggggcataccggggattcggggtgacccagagctgctttgccaccgaatgcaatctgaatctgctggcagagatggcaggcattactccctgggaaatccgctacaggaatgccatacggcccgggcagacgctcccaaacgggcagattgccacacaagactgtgccctggcccagactctggaggcagtaaaagaggtgtatgattcccatccgtatgcggggatagcttcctgtatgaagaacagcggggtaggtgtaggaatccctgatattggaagatgccggcttactgtggaaaacggcaaagttcatgtacttaccagcgccgcctgtatgggacagggagtggggactgtgaccatccacattgtctgtgagattaccggactttcccctgcacttctggtgcacgagaggcccaacacagagagaacgccagattccggaactagtaccgcatcccgccagacattgtttacaggggaagccacaagaagggcatccacacttctgagagaggcactggaagagaaaggctcactggaagcactggaggggaccagctattatggggaatacctgggagagacagaccccatgggatcttccaagcccaatccggtcagccatattgcctatggctatgccacccaggtagtgatcctggatgaggccggaaaggtaacggaggtagttgccgcccatgatgtgggaacggtagtaaatgtgcagtcctgcgagggacaggtggagggaggcgttgtgatgggactgggatatgcccttacggaagacttccctatggtagaaggaaggcccacactgaactatggaaaactgggacttttaagagccagccagacaccgccggttcaggcgatcctgattacttcagatgaagtgctaaaggaagcctgcggagctaagggagtaggggagatctcttccgttcccacagctcccgcctgtgcccatgcctattaccgttatgacggaatcgagcgaacaaggcttccactggagaatacattctacaggaaagcaaaataataacagagagccattcaccggggttcggatgtatggaggaagatggaaatggaggaatgaggatgaagcaattactaaaacacggcacggtagtgtcaggggtaggctgctgcaagaaggacattttaattgaaaacggaattatcagggaagtatctccggagatatgcgacggggaagcccaggtagttgatgccaagggaaagctcatcttcccggggtttattgatgctcatactcacatggatctgccggtggcaggaacggttaccgcagacgatttttactccggaacccgggcggctgttgcgggggggaccacctgcattgtagactttgccacacagtacaagggggagacgctggaagaggcattggaaaactggaacaaaaaggcggagggaaggtgctcctgcgactatggattccatatggcgatctctgatttggaaggggccggggaaacccaggtacaggccatgattgacgccggggtgagcacatttaagctttacatgacgtacccggatatgcttttgagagatggggagctctaccgtatcttaaaacagctgaaaaaacagggcgggatcgccggggttcactgtgagaatgccgaggtgatcgatgctctgactgcagaggcaaaagcggccgggcatctgggaccggatacccaccccagggtgcggcctgcaggcctggaggcggaggcggtaaaccgtctgcttgccatcgccaaggaggcagatgcaccggtgattgtggttcacctgacctgctgggaggcatttgccaagattcagagagcccgggctagagggcagatcgtatttgcagaaacctgccctcagtacctgcttctggatgagagctgctataaaaagaatggatttgaggctgccaaatatgtgtgttctccgccgctgaggaaaaaggtagatcaggaatgcctgtgggaggctttaaaaacaggggatatccagaccgtttccacagatcactgcagtttcactctggcgcagaaggagatgggaaaagaagatttcaccaagatccccaacggtatgcctggcgtagaaaccagaggagtactgctctatacctacggggtagaggaaggaagaatgaccctggaggaaatgtgcagggtgctctcggaaaatcctgctaagctttatgggatgtatccgaaaaagggctgcctggagccgggaagcgatgccgaccttgtgattctggatcctcataagccagggatcatccaggcaaagacacaggaatataatatggattatgcaccctttgagggctggaatctgaaaggcactattgacaaagtttatctgcgtggtaatctggtagtagatcagggaaaggtggtctcagaaaaacagggacagtatatttcccggggaaagtatcagacagatttcaactaaaggagaaccacagacatggaaaaaaccattgatgccagaggacagcagtgtccgaaaccagtgatcatgacaaaaaaggcaatggaggaagccgctcccggtacagtgttgcttgtacaggcagataatgagactgcggtgagcaatctgcagaagctggccgtatcccagaatgcagaatatgcatctgttcaaaagggagagaaacagtatgaggtccgtattacagtcactggggagggcagagaggattcagcccttcagccagcagatgaagactgctgcctgccggaggaagatacggtagtagtcataagttcagataaaatgggcgagggagatgaggcactgggaagaacactcatgaagggatttatctatgcccttacccagctgccggttcctccaaaaactgtgcttttgtacaacggcggggctaagctttcctgtgagggatcggattcagtggaagacctcagggctctggagcaggccggcactgctgttttgacctgcggtacctgcctgaaccattacggattaggagagaagctggctgccggtacggttacgaatatgtatgtgattgcagagacacaggctgaggccgccaaaatcatcagaccataaggagagcggaagatgaaaccaattattgtcagagggggaggggatcttgcgaccgggacgatccaccgtctgtgcagaagcggatatccggtcattatcctggaggccgggcagccgtctgccatccgcaggagggtttccttctgtgaagctgtctatgagggaagtatgacagtcgaaggcattacctgccgtctggcaaaagattggagagaggcacagaaagcggtgtcccctagttcccccgtacttctggtagatcccctgggggatatcctgagggaatatcacccggacgttttaatcgatgccattttggcaaaaaggaatatgggcaccaggcgggatatggggaatcttaccattgccctggggccgggattcacagcgggtgaggatacccattacgttattgagactatgcgtgggcatgatcttggccggattatttccaggggaagcgccgtacccaatactgggattcctggaatcatcggcggttatgggaaggaacgggtgattcatgccggaggggcgggaaggtttttccccctggccgggatcggtgaatgggtggaaaaggaccggattataggaaagatacagaaaaagccggaagattctgagaactggattcccgtgagagccagtatctcaggaattgtaagaggcatgatacgggaaggatatccggtaacagaaggttttaaaattgccgacatagacccaagagaggatgccgtactttactgtgatacgatttccgacaaagcaaggtgtattgccggaagtgtgctggagcttgtatgcgcctgggaaggggggcagcaggcctggcatgaccggtttggcgaaggagaaaaaagtgaatggctgggaagaactgacgagtgaaaaagagattattacagtgataggtgcaggtgggaaatctacctgcatccgttatttagcggagaaatacgcaagtatgggaaaacgtgtgctggtaactacaacaacccacatgagacggcctctgacaggcgcctgcctgagaggaaccgcagaggagatcctgcagacactggaagggacaggatatgcggttgccggcatcccgttgaaagagggcagtgtagataaaataaaagggcttcccccagagatactgtcacgggtaatagcaaaggcggatgttaccctgatagaaggggacggctcccgggggctgcctgtgaaggtgcctgccccccatgagccggtgattgttccccagaccacaaaaatacttttgcttgccggactttcctgtctgggaagtgaactgggggagatatgccaccgcagggagctggctgcccggatactcaattgcagtcaggagcacagaatcacaccggaagatctggcggtgctgctcagggaaggatatctgctccctctgagagagacaggcaaagatatcccggttaccgtaatcctgaatcagggagataccagagaacgcagagaaaaagcgtccaagtgcaggcaattgataaaagatatgccagtggtgattacatctctttcaaagggcaaaacttatgatagtatattttaatatacagcaagagctgtatatccccccgcagggtatgcacgaagaagtgcccttcgggcataatataaagaataccatgagaggagtactgtcatgaggaaaaaactgctgagtataattcttctgttcctcctggctctgtggggctgcggagcacaggacagcaattcccgcgttcccgttgcaggggaggaaatagtcccttctaattacgcaaaagaaaaaaactggatgctgttggaagagaaggggcagaaacctgtggatgtcttttatctttatcccaccagctgggcaagaaaagataaaaaggattatcctgtcagcacaatacaggataaaaatatgagaaagcgggcaagaagtgtggcggcgtcccaggcaagagttttcgatatggccggaaatctgtatgctccctattaccgccaggttgaggctgcatttatcctggacagggatcaggaggagcagacagcgtactatggaggtgtgccaaaaacagacgcgatcgctgcttttgattactatatcaaacactacaatcagggcaggccctttctcctggtaggccattcccagggtgcagtgatggtcaaggagatactgtttgactatatggataaaaatcctgaggtatataagcgtatggtggctgcctatgtaattggctactctgtcacagaacaggagcttcaggagcatccctatctgaaatttgccgaggggccggatgataccggggtgattatttcctacaacacagaggctccggggatgacagaaaagaatcccaccgttctgcccggagccatctgtatcaaccccatctcctggaccagggacgaaaccccagcctctgcttctgagaatgccggttctctcatcaaagtagaagggcgggaacaaaagctggagggatttgcagatgccagaattgacaaagagcggggaacggtgatctgctctaccgtagatccggcagtttatcacagctcggacgtgggacactttcccctggggatatttcacaggtttgatttccggttttattattacaacctgaaagaaaatgcccaggagagggtggagaggtttttggaagagtgggacggtgaggaaatcccgcggcggtaggctgtctggttcgggcgggagggaggcctggttatgcaaacactgccgtctgcgatcctccgcctgccggcgagcttcacatacacaaaattataatttttacgtgacttttcccaaaatgttatatatgatagagatactaagttcatttccggacagaaggttcagaggtggcggccggtgggaggaactgagatgaagattcatatgattctgctgatggctggtttcagtaagagatttggtgaaaataaattgctttacaagatagacggaaaaccgatgtaccgatatattgcggaggttctcacggcggtgctgagggaccaggcggagacagtttctctgaccgcggtgacccagcatgaggctgtgcgcagcgggctaaaagagatggggatacctgtgctctggaatcctcacagtgagcgggggatttcttcttccctccagattggcctggattctttgcggggaaggcggccgggtgaggagaaagaggcagtctattatgctttttttgtgggggatcagccttatcttcaaaagaagagtgtggaggatttctttcaggcattttcttgtcaggacaagaggattgggtgcatgtccgcagatgggaggccggggaatcccgtgatttttcatgaaatgtataccgatgagctgatgaacctctccggtgatgtgggaggaaaacaggttatgagaaagtatccccgggacattttctattaccctattgccgatttccgggagctggaggatgtggatcataaagaggagtctggctatgaggagatggattaaactaccaggagatacagagatgaaggaatacagaagggaatataagaaaaaggggtttactttagtagaagttattgttgtgcttgtgattataggaatcctgatggcaattttaatccctgcgctcaccggatacataagcaaggcaaagacaagaagctgtgaggtgcgccggagcagcatgcagcggtattttaaggctgcctatgcgggggaggatgccctgagagaatgcacagatattgtggaactgaaacaggcagcggggcaggatattctggggtatatggtgaagaacgggtactgtgaggaggaagacacagagtgtccggtgtaccaccagaaatacgaggtagacttctttgtagaggcagacgggaagatgaacatagactttatctgtccctgcaatgagacctccttaggcggatatctggcgcttgccaagaacttttacgatggaaaattggcggatggaagcaaatatgatgacaggaagtatctgatcgaagatatatacaagaagcggggatctctgctgaaagtatcctcccagtttaccaaaggcactgcctatgagggcggaaaagagatgtactggagaccctattacctgaacgacggcactatggtcatgtatgccaccgacgagaattccgcctcccatgcccagtggaggggggcgctgatgtatgtaaacggtaaggtatacgagctgcccgagggagtaaatgaaaaaccgtatggcaagtctatctcctggcttaacactgttcagtcttatgaggaagcggataagctgttagaggagaaagggtatcggttagtaaagtaaatatggataaagcagtaactgtgaaagcggggtccggcattggggacataattctaacaatgccggaccccgctttcgcagttacttttagggaacctctgcaagatctaatccctctgctttgagaaacgacactatatcctcttggacgcttacatcttccagttttgaggtaatgctgaaatagaaggtatcccggtaggagcaggcacacatttggagtttatctgtgcttgagattactccgaagcgcctgatgtatggctcataggacttaggcattctgagggcactcatattagaaaatacagcagatacgttaccgcttcccagaccagttcccagccggataaagaagttttttattcccaggggaatgtattttaacagcagattcttttcaattctcacataatggttcatgcggaaggccacctgctccaggagcagttcctgggaaaagcgttttttcacatgcagcagtatatcctcaaaggaatcttttttatggaatctatactcaatttccatccagccgaaaaagtttgtcatggatttcgaaggataataatttctcaggttaaccggaatcatgactacaaccggttttttcttctgagcttctgtcatctttcgggagagcgcctgaagcaggacggcggttagatataccgtgatagaaacctggcaggcccggctgtgctgcagaagctgtttgacggagaccgtatattccataattttcatatcagcctgggctaccttccgccccttcatctgataggcacggctgctttttctgatttgtaccgcggtacggaccggagaataatagcgggagaagctgtcctcctcctgttcttccagtgtccctgcgcccccggcatcctccccgtcaatcctgtgcaggaggccaagataagctttcacaagatctgccaagaaacaaaatgccccggtgccgtctgtcaatgcgtgaaacacctccagatgtatactgtcccggttgtaggtaaccttatagagcagattatcacggccgggcgaaaaaatggcactgcagggtacgtctttctccttttttatcacagggcggatactgcttggctcaaaataataccagaagtatcctttttgtaacctgcattggaacagaggatactttaaaattacttgctctaatgctctttgaagaacctggggctgtacgggctcatttaatttgcagtacacccggaacaccctgctgtccttcttcccggctgctgcgggaaaggcaattgcggcattgtcaagttttcttcgtattctcttagggggatacattggctacgcctcctttaaaaactgattgataatctctaagctttcctgcacatacagatattttatgccaagagcaaaatatccatgcagggcatgttcgattctttttaccgtaacctcatttccggcttcctttagtcttcgcccgaactcctccccctcgtctctgaggggatcgtattgggcggtcagaatcagggtgcggggaagatcttccagatgttccgagagaaggggagcaaaataggggctgttccgatcctccgctctgctctggtacagattcatatattcctccatcttaaccgcagtgaggagataatcccggccattttcccgtacggagggaaagggggaggtctctgtatagtcattccacagggcagggtagattaaaatctgctgtcttgggcggaaggcattccggtctctggccagaagcgtaagggcggcagtcagactgccgccggcgctgtctcccataagtgtgatattctccggtctcaccccttttaggtattggccggaaaataagacctcggcaactgcgtacccatccatcagggcagtggggaagcggtgttccggagccttccgatactccacggagagtaccagctgattcgtggactgggccatccgggaacatatgcggtcataagtttcaacactttctgtcacccatcctcccccgtggaaaaataaaagaaccttcccgctgtactgaaagatcagctcttcttccagcattttttgggtggggaagtaaattcgtaccggaacttcatgggttccattcataatatgtacatccagcttcctggcgaaaatccgcatagggtccagcttcttaagctcggcaagccgtctctctgcctgtacatccagagaaccataggaaagcgccctcagtacttttttcactgcataattcataagttttttctccatatcttagctggtgggaagacagtctcagtcgatgtaaggtatatctcccggtatctgatcttcctgaagcagtacctggaaggcggtgaggggccgcgtatatccgataaaatccaaaaaggcctccttttccagaatcagaagaggctttatatgtctcttgcggataaactgcaaaagcgcgtccgccgcgtcctcataggctgagttactctcaaaatcagaattctgatggttcagacagaggtaggtgccggccggaagaaccctggagtacatgggagggtcatgagccacagaattaatatccagaaaaatctctgtccgaaccagctcctgataggggaacccgcaggaaaaaagagagccggactgataggtggtgacttgattttccttggcaatctcctggtacagtccctggaaacggctgaccgcctcgctggaggatggaggacaggtgcagggaacactcagaatcttcctctcttccataggccggaggtagaaaccctccagattctgtatcttttcgatggaagagatatgggcctgaaacattctcagcttcagaacatctctctggagagagaccagtttttcctccatagctgtctgcagggtttcaaatgcctcattccaggcaggaagctctgagtgttcaaacaaaaatttaatctctgccactgagacattgagtctgcgcagatactgtatcatctctacctgaaacagctgttcggagctgtagtaccggtatccggtttcagggtctacataggcgggctttagcagtcctacccggtcatagaaacgaagggccttgatggtcacatgtttgatttttgatatttctccgattttataataatttttcataaattttaactttctattgactctccccttaggggatattgtaacataaaattactaaatattaaagataaaaatgcatttttttagacaagtagcacaattgcgcacaaaaagtagaaagggagaataaaatggaaaaaattgtattgcaactgcaaagatgtaaaggctgttacaactgcatacgtgcgtgtccaaaaggcgcaatcacaaaatcgggcgccagcaacaaaaaaggatatgaagtgatccaggtggatcaggagaaatgcatcgcctgtgcaacctgctataccgtctgtcccgactatgtatttgaagtatgtaaaccggaaaaaggagcgtaaggaggaagatgcaaactatggaaaaagggttaatgaagggaaatgaagccctggcagaggctatggtccgtgcgggctgccgttttttcagcggctatcccattacacctcagaatgagattctggaatatttaagctggcggatgaaggaagcgggaggcgcttttgtacagtcagaatcagaactggcagcgattaatatggtgctgggcgcagcctccgcaggtgccagggcgatgacctcatcctccggccccggattttcactgcttcaggagggaatctcctatcttatcgcaggggatatcccggctgtcatcgtagacgttgcccggttcggaagcggaatcggagagatcagccagggacagtgtgactataagctggtcaccagaggcaacggccacggagactctcatcttctggtgctggcaccggcatcggtacaggagagtgtggacctgatgatggaagcctttccactggcagagaaatacaggcatccggtgattattctttctgatgccgccatcgggcagatggtagaacctgtcagctttccgcctatggaagaggttgacatcgaccgggatgactggacagtgaaaggctgtaagggagaggaagagtcgaaaaaaataaccaatgtattctattacatggacgactataattcatttctgcgggacaaataccagagaatgacggagaatgaacagcgttacgaggcgatttgtgtggaggatgcccagctggtgctggtggcttatggaatcagtgccagagtctgcaaggaggcggtgagaaaggccagaagccagggaattcccctgggactgatacggcccatctctatctatccctatccgaaaaaagcatttgccgagcttacaggggaatgtaaagcgctgatgaccgtggagatgagcattaccggacagatggccgaggatgtgaagctggctgtggaatgcaaatatccggtatacacatacggaaccggaatcaaggttccaaagagtgcggatgtagtgaaatatgccgtggaaatattagaaggcaagatggataaggaggtattttagatggttattaaggcaccggaacggattacatatacagacggccattccttctgtcctggctgcggccatgggattgccattcgtctcatcggcgaagctcttcaggagcttgccctggaagaacaggccattatctctctggatgtggcctgcggggggatgcccattgatgtgtggcgctacgataccatagaggctgcccacggaaggccggtggcaaccgcagtgggagtgaagatggcaagaccctcccagccagtgattgcctatctgggggacggggcggcatactctatcggtatcgcggagaccctacactcagccagaagaaatgacaacataacagttattgtgctgaacaactgtgtcttcggcatgaccgggggccagatgtctcccacttctctgcaggggcaggttaccagctcctccatccatgggaaaagcatggaagagggaggggccactatggatgtagtcaggatgctgaaggatatggatatttcgtatctggcaagagcagccctatgcgatgcggggaatattaagaaggccaggaaatatattataaaagcattggaaaagcagatgaacggggaagggtatagttttatcgagcttctctctccctgtcccaccaactggaatatggatcccggcgtggctgctgcatatatcaaagaaacgattctgccggtattcccgacaggggaatttttaggataagaaaggaggagcatatgactacagaaattatttgcgctggcttcggcggccagggagtgctgaccacagggctgatactggctcaggcggcataccaaaagggctgcaggctgacctggtatccctcctatggcgcggagatgcggggaggaaccgcaaactgcaatgtaaaaatcagcgatgaagaaatcgggaatccatactgcagtgagctggatcttttgattgcaatgaatgaaccttctctggaccggtttgaagatatgctgaagcccggaggagtcctctattataactcagatatggtagaccccggccgcagcttcaggaaagatatccaggccattcccgtggcagccaaccatctggccgcagaggcagagaatcccaaaggggcaaacatcgctgtcctgggggcgctggccagaagggaaaatctctttaccagagaggaactggaggaggcaatgtgcggcttcttcgagaaaaagggaaaaggtaagtacaatgagaaaaacaaagcggcatatcgtgccgggtatgagggagtatagagagggggaaaccgtgtggacttaaaccggctgctgcgcccgagaaaaatagcaattgtcggagcgacagaaaaagaaactatggcaggattcgccagcagaatgtttattgaacagtgcggcaaacgccgcggagacttgtacctggtcagtctcaaaaatgaaactgtattcgggatcccatgctaccgtaccctgagtgaactgccgggaaccattgacctggcggtgatctgcactcccaaacagacagtcgccggccttttagaggaggcggcccaaaagggggcaaaaggtgctgttgtatttgccagcggatatggggaaaccgggaaggtggaagataaaaagctggaggaggagctgatcgatcagtgccaaagactggatctggccttaatgggacctaactgcgccggatttctgaatttcgtggatcgggtattcgcttttggattcctctttcacgccagggaatccgccggcagggtagggctggtatcccagagcggccaggtttgtatggcgctgatggagagcgagaagaccagtttctcctacgtcatctctgcaggaaactgtaaaattgtaaatattgaggattatctggaatttttggtggatgacgaagatacccgggtggtggcagcctatgttgaggggattcagaatccggagaaatttgcagcggtgctgaaaaaagccgcagaaaagaaaaaacctgtggtagtgctgaaagccgggcggtcggaaaagggcagcagagcggcggcctcccacacagggaatttaagcggttccgataaaaatgtagatgcatttttccggaaattcggtgtcatccgggtggatgacctggaggaactgctctctgtatgtaccgctattgcaaccctgccggtgcttcccagaagcaataagctggcttttgtcaatatttcaggaggggagactaccatctccgcggacgcaggatatcttcacggactgaagctgcccgacttttcccctgagactgcaaagaagctgcgggaagtcctgcccgcctttgccacagcccagaacccaatggatctcaccggcggctccaacggggatacctttgaacgggtggctgatattgtgctggaggatccgggcattgagatgctcatcacctctctgcagattacaaaaaagatctcagatatcaccatctatgatttcctgaacggtctcatccggcactgtgaaaaggaacagaaaaagccggtggccgtggtgccgttgattgaatccagcagagaggaagaggtgctggaacgcctgcgggccgtaggggtacccattctccctccgccccactatggataccgggtcataaaaaaactcctggattacacagactatctggagacaatggaaaaccggacgctttctattgtaactaaaagtgaggccagcgggagggaaccggtaaaaactgccctgtcagagcatgagtcaaagctgctgtttcagaaattcgggattccctgtccccctgaggagatcgcggagacagaggaagaggcagtgcaggctgcggctgccatcggctatccggtggtgctgaaaatagaatccggggatattctccataaatcagaagcgggaggcgtgaaagtagggattgcctgcgatgaagaggtgagaaccgcataccgcaagattctggaaaatgcgaagaagtataatccccaggccttgattcacggagttctggtacagaaaatgctggaaccgggcatggaggccatcgtgggagtaacctgtgatccccagcttggacctatgattctcactggtctgggaggtatctttaccgaggtattccaggacgccgccctctatcccgcccccctgaatctatgggaggccagagagatgatactctctttaaagggcagtaagctgtttcgcggctacagagggaaaccgccccttgacacggaggctctggcccgggtgttggtgcaggtaagcaatctggcggcagagtataaggatacccttgtggaaatggacattaaccctgtatttgtataccccgataaagagggggtcagtgctgccgacgggctggtggtattgagtgaaaaaccataacagaagcaacgggaaggcgcagtgcgcgaaaggaggaaagggatggaacagaaaaagggtcttggcggatgggtgatggccgcattaatgatcgcaggactatgctacgcggcatcatactccctgccttatattaaaggtgtattttatggtcccatgatggaggcaacaggcgcttccaacacgcagctggggctgatcatgtccgtgtatgggttcggaaatattgtgtttaacctcatcgggggatttgtgactgataaactggactacaaaaaatgtatcgttgtgtccctgttggggaccacaattttaagtgtctggctggcgctggctccgtcggtaattaacatgtatattatctgggggctgttcggactgaccacattctttgtgtttaaccccgcaatatttaaaatgccccgtatgatagttccggatgaactggtaggagaatccattggatttttttcctttgcccagtccatcagctatatgatcattaattttgcctccctgtatgtgtataacctgtcggagaacaaggtcagccaggcaacggcattttccagggtagtgtggacctatgcggcgtttaccctggttgcggctttgggctgcatgctggtgttcagaaaggtcaaggatgtgaaaaaagagggagaagaggaagataagttcaccttcagccagctgttgctggttatgaaggagccggggctctggatgatgattatctgcgggttctgtctatactccacaacccttaccgcatcgtattttgttccttatttccatgatgtgttcggagttgccattacctttgcaggcgtgctgggcgtgctgaatatgtatggaggcagactcttcagccctattttgggcaagattgctacaaagacaaagtatgtctcccggatggtagtgttcggggcagtattcctgattactctgtttgtgctggtactgctctttgcagcctatgtgccggtgggagttcttgtggccgtatctctgggaaccggagtactttccacactctttaccaacatctgtctggctatgacaccggaggccaatgtggccagaaatgcaagcgggacggctatggggctgtatgcagccatcgcctatgcgccggatctgttccagcatacgctgttcggacactggctggataagtacggaaatacgggatatatttatatgtttatatttaccctggtacttctgaccgcaggggggatcagcgccttccttctgtataagaagagcaggagagagaatgtatttggagatgccccaaagaaggcagaggcatgaggaatcaattgaaggaggatatgaatatgctgaataaaccttatattgtaattgaatggaatgatacggaaacggatgctgtgggctggctgtgctgttttaactttgtgagcaactactgcagcggcggcctgcgggtacacgagacggataccagagaagaagtaattaagctggccacgggaatgggatacaaatacgctgcctgccactccaaagtggggggcggagccaaggccggcatccggtatgacaatacaaaaccggataaactagaggtagtaaagcgcttccttctggccatagccccctatctggaaaacggagtatcactgggcggcgatctggggattggatacggacaggtgatggatctgtacaaagagctggccatcccgggcgttccccatctggttgcgaagaaatatgagagcgaccctaagattatccagggattaaaggacaacgataccttatttgatatgccgtacagaggctttgtgatgtacgatgctataaccggctacggagcggcggcagggctggatgagagctggaagcagatgggcggcgggcctggagccactgttatgattcagggcttcggcgctgttgggaccggggcagcccgttgtctcagcgagatgggctacaaggttgtggccatcagcgatgccaagtgcatggtatactgtgagaacggcctggacgtggatctccttataaactctgtaaaagacagaggctatctgaaccaggaagccttccttccggaatatcaggtgatgaagaacacgcagtgggaggaaatcgcctgtgacatctttatgccggcagctctggacggggtgatcaacgaaaagaatgctgaaaagctgcagtttaagctgattgtggaagctgccaatatacccaccactccagaggcagacgtgattctggagaggagaaatatccctgtggcacctgattttatcgtaaatctgggagcgaccagactctgcgacgcagtgcccttcggactgattcccctagagccacaggctcttgtggacgactctcagaatattatccgggatcacatcagcaatctcttccgtatgaagaaggagcagggcattacccttcgggaagcagccaggatccgctgtcagccgctgccctccgaggcgccggatgttgactggcagggaaaaaataaataacagtcaggatcgcagggagccccctgcgatcctcctttgctatctccacaataatccatggaaaaggcgggcaggctatgaagaaaagagaaaaagtaaaaagaaaggggattccggtccccaatgtatatgttttgatgctttttgtagtgttaatctgcgggattcttacgtatgtaattcctgccggcgaatacagccgggtaacaggaagcgggggacaggaggtagtcgatcctgacagcttccgttatggagaacagacgcctgtaggcattatggggcttctggaaaccgttccacagggacttgtggaatctgcgggaatgatttttcttatctttatcttggggggagcttttcaagtggtacaggagacaggggcaattcacacaggaattgcgattctgacaaataaactgggaaaaaaggaatttgtggtaattccagtaatgatgtttttgttttctatgggaggagcactgtacggaatggcggaggagaccctgccctttatacccattatgatccttcttgctacgtctgtgggatatgactccctggtgggagcagggattgtgcttgccggctccaccgcaggatttgccgctgcgtttctgaatccgtttactgtggggatcgcccagggaatcgcgggcgttcccctgctttccggcatgggactgcgggtagctctctatatctgtatggtttccctggccatcggctatgtgctgcggtatgccctgaaggtaaaaaagtctccggagatcagcccagtgcgggagattgaccggggcaggacagatcgcctgaacctggaggaaactccaaagcttaccgccggtcagattctggtgcttttgacctttgtggggactattgcagtgctcatatacggagtgtttcgttacgggtggtatcttcaggaaatcacagccctctttttcgggatgtctgtgcttgccgctgtatttacgggaatgtctcccaacagatacggagaaaatctggtcaaaggaatgacggggatcgccgggggagctcttgccgttggattcgccagatccattttggtcgtcctgcagcagggaggtatactggatactatattgtacgggatagcaaaaggggttgcctggctaccggctcagatttcggccatgggaatgtatctcttccagtgtctgctgaattatgtgattccctccgggagcgcgcaggcggctgtatccatgcccatcatggcccctctgtccgatttggtcggggttacccggcagacggcagtcctggcatttcagctgggagacgggatttccaatattttcacccccacttcgggcttgttaatggcaggactggctctggggaagattccctggaataagtgggccagatggatcggccctctgattcttctggagtatctactgggtgctgtcttcatcattattgcccaggccattcattacgggccgttttaggggcaggtgcaaaatgaaagaataaggagcagaatatgaaagaaagaattgtgcaggaaataaaaagacaccgggaagagatttttcagattgccagggagctgtatgagcatccggaaataagcgaacaggagtattttgcggaaaaactcctgacggagcatctggaaaaacacggtttccagacagagcacgggacctgtggaatacccaccgcgttcactgctgtctgtaaagggggaaggccgggcccaaggattgcatttctgtgcgaatacgatgcattggaggggattggtcacggctgcgggcacaaccttatctctgccatgtcctttggggctgccctggggctgaaggctgtgcttgaagagaccggaggagagattgtggtcttggggacccctgcggaggaaaccaacggcgccaaggtggcaatggccagggaaggcatttttaaggatatcctggcagcgctcatgcttcatccggacagcgtatccaaggagagcggaagctctctggccctggacgccctgcgtttccgcttccggggaaagacagcacacgcctctgcggcgccggaaaagggggtcaatgcgctggatgccgtactccttatgtttaatggaatcaacgcgctccgccagcatgtgacagacgatgtgcggatgcacggaattatcgctgaggggggactgcgccccaatattgtgcctgattatgcggaggcgagatttaatttccgggctgcggaaagaaagaacctaaatgaggtggtagaaaaagcaaaggaatgtgccaggggagcggccaggatgacaggggcgtccgtggagatagactactatgagctgtctaatgacgatatggtgactaacccggtgctgggaagacttatggccaagaatttcaggtatatgggtgaaacagaggtacggcctgccagccgggagatgggttccatggatatgggaaatgtaagtcatgtggctccggccgcccatggcttcatcggtctgggagaccacgagctggtgcttcacacaaaagaagtggcggagtgtacggtttctgagaatggaaagaaggcggcagagagaggcgcatgcgtcctggctctcaccgggtatgatgtattggcatctgcagaggtgcaggaagagatacgcaaaacatttgccggagagggaaggtaaacgctcccagaactttacatgccaaatatcattttttgcatttacgaaactggataaatatgataaaatttaaagactaaaggatatgtgatttatcttaatagcagctgcaccttctggcaggaatgccagggtgcggctgcaattaaaattaaaatgatagaatagagatgaccctctatggccggaaataaaaagaataagaacaaaggcttcactctggtggaagcgattgtaacacttaccatattaggaattttactgacgattgcgggcttaggcttatcggcgtatctgcgccattctgcctttgtgcgcaataataattatgcccagacaatttattatgcggcatcttcttccctgaaccactataagtccaccgggcagctgaaggaacttcaggagtatatgacacagggagccggaaagaatcagactgtggacagctctatggtggaggatatgccggaggaatatgacggacgtctgtactatctgactttggtgcccggcagcgctgacacggagcgtttatatgaattgctggagccttatatttatgatgaatctgtgcttgacgcggccattactgtggaattcgatcctgcggagggactcgtctattcggtctgttacagtgactacgcagactctttctactaccagaagggagagaggacgaaggaagaccggggaagtgtgaatatcagcagccgtacccgcagcatccgcaaagagcggatgattggctattattcgtcagatgaaatgtccgaacagtcaccgggagccctgggcaagcctgagcttcaggaggtggagctggtaaacgacgaagaacttaccctgaactggtatctgaaaaaggagtattctgcactgacccagtatctgaattattctattaagctatatgacaaagagtctaaaaagctccaggccacgctggaagtgaacacagaggataagaataagattctgaaaaaaggttctgacctggggaataagatattctgtgatgttactctttacagctatggggcggacggaaaagaagaaagccataccgtgatgaaagactgtcctttttatgcctacggggagggcagcaggctcactctggttttggatgccgtggacctgggagctgtggaaaaaacctccgtggatgagatgaaggataccctgagtgtcatccgattgggacttcaggagaaaaccatatatgccagagtcaaagcttttgccaagaattataaagccagcgcctggaaacagagcaacagttcctgcaccacctttgggtctgccgtccaaaacggaaaccagacagtctatggcgtgaagaatgcaaggcatctttataatatacggttttctgagaaggaacgggaggctcttgcagggaagaaaaaggacacatccaaaattatttattcccagacaggaaatatcaggtggagtcgggagaacagcattctcagcagggagcacgtctatcaaaacggcgctgtactgacttccgaacaagatataaataatacagcctttcctcccatccggaagttaacggaaagttccgcatatacaggaaaaagcggcaatacaaaatacaccatagaaaacctgattctaaaggcagacagcccaaaagtggaagaaggtgacaaaaccccccaggtgatagaacctctgggtctgtttgctgtgaatgaaggaaccatacagggggcggcccttttggaggtgaccgcagagggggacagctgtgtgggcgcgctctgcggcaatgataagggcagtatttctgactgcacggtcagcggttctgttacagggactacagatgtaggaggccttgtcggaatccagacaggagaaagggatgcggtgtataaaaacctgaccaaccaggctcatgtctccggaaagctccgggtaggagggatcatcgggagcattggaagaacagcaggggaggatgaaaaggaaaaaacaggggatactcttgaaaactgcagaaattacgggggcattacagccagtgaggcctccggcaaatacataggaggcatcactggatacagcgacggagggatcctaaaggactgcgtcagcaccccttccgtatctgtgaactatgaagaagagaagcctgcggatttgtttggagattttgtgggcggaattgtgggatactcgaaagacagcgccatcagcggctgcaagaccagcaaccgtgatatacataataaaatcacagacgcttacgttgtgggaaaacgttttgtgggcgggattgccggatttacggaggacagtatactggacggcagcctgcaggcgaaccaggcaaatattctgggagaatcctatgtgggcggaatcgtgggagccaacgggattctggacgcggaaacgggtacagtatcaaaggatggcaagaatgaaaaaactgtggaaaactggaccaatgaagggatagttgtggccacagcagccttcggaggcgggattgccggatataacggcggaaggattctcggctgcaccagcagtgtgaataccctgtcccaggatggggaagagctccttgccaggacggaaaagcttgggaaaaacggagattatatcgggggaattgccggttataatgaaggaaccatacgaagcaaggacggcaccagggtgaccagtgtagtggccggacataactatgtgggcggaatcgcggggtataaccgggcaggggataccggggagaatgcgagcatacggggctacacccttgcggggggttacatcagcggcagctgctttgtgggcggatatgtgggtctgaacacagggacagatattttcacagagggcagccgcaggattgactccaatcccaatgcggtggagggctcctattttgtgggaggtgtattcggaggaaatattatctccgtctatgaggagaaaaggatccccattaactgcgggacagacaacttcctgggaagtatccgggcagaagcaggggcttttgccgggggatatgcgggctatacccagctcgtggcaaccggggaggaggcagaaaaaacagccgctctctactgcaccatagctgaccggcatgccggggatgttcccgggatgacaggtgaggtactggcaaatgaactttccgcagcttctactacagatgctgttttagaaatgtacaacgaagaggacggccggggaggaaatcagaatactttaaaatctgttgaggctgagctctatgcaggcggtgtagtgggctataatgccggtaacaccagccttcttctcaaaggcattcagaacaacacaccggtatacgcctattcggatactgaaaatcaggagctctcctatacggaaaccttttcctatgccggaggggtgataggcatagcctccgagcgggttaccattgatgactgcagaaatacagacaaaggaatcgtacggggacagggaacctataccggcgggatcgtggaggtaaaccaggggacgattcagaactgtaccgtgggctccatgaccggggaatccttcctgggaggaatcgcagggcttaataaaggcggacggatcgaaaactgcacccttaccggccagatgaggggagattcctatttgggcggtattgtatgccgaaacgagggggagattgtctcctgccgtgtgctccctgacgatgcgcaagtgtcttcggttatgggagacggcagctatatcggcggtatctccgcggtgaacagcggtgataaggccagcattacaggctgggagatcaaaggagatatagaaggtgccgggagctttgtgggcggaatcgccggaagcaatgaaaacgcggccgttatcggtcttgagaaaaagcaggaggctgcccagtccggaaccattaccggcggggagcatgcgggcggaatcgccggagttaacggaggggacatttatgcctcaggggaacttctggagaatacgtttacagtaagggctttggaaggaaacgccgggggaatcgccggcctgcaaagggaaacaggaaatatctcaggcaccggaaacacaggcagtattattgcggaaaagggaaatgccggggggattgtctgtgacaaccggggcagagtagaggcttcggaaaacagcggggaggtcactgctgcaaacggagaggcgggaggcatctgcggggaaaacagcgggacagttaccggatgcagaacgctcggcggaactctgtctggccagggggctctgggaggaatcgccgccgccaactatggaagaattgaagacagcagtctcttaagcaaggcagagcttgctattatggggggacagccagaaaattatatcggaggcatagcaggcaggaacacaggggttattgtcaccagcaaggtgggcagtaaaactgcaccggtacggttatcctccgacgaggacaattccaatgtgggcggtgtggccggctataacgggccggaaggccgcgtggacgggatgaaagcaccggaaacggtatgctatgcggatattatcctggagggcaaggcccagggaaatctgggagggatcgccggtgtcaatgagggcactatctcctattacggggcggcgggccgcatccagggatctcaggcccagggacagccgtacggcatcgggggaattgccggcgtcaatggaaacggaacaaatacagcggtaatccgcaattgtacatatcagggagaaagcctgaaagggggaaagggcagcatacacgggaatggcatctctaccaccagtgaggatctggcgcgtgtgggcggcataaccggccagaacctcttgaggggagagatccgccaatgcaccattgggggcggcagcagcattacaggaagcctctcctacctgggcggcctcgcaggctataaccagggacttatccaggattgtattgagcagacagagtccgtggtggttcaggggataaagagcagctgtgtgggaggtgctgtgggatataacggggacgagggcaggactgccaatgtctctgtgggcattgctgacagtacacaggaaagcaagaactggagcattgtcaacagccagaatacagcccatgaattcggcacagggggcatcattggaaacaatgtgtcccgctgcgaccagagcgggcttacaaaccatgcttccgttaaaacggatcagtattatgtgggaggaatcataggcattcaggccaatcggatttcccagggaaccttaatctcagactgcagaaatacaggttccgtctacacctccaggtacggcgccggcgggatcataggctttctgagggactacggagtcaccgtaaggggctgtgtgaaccagggaaaggtgacggcggactgcagccgggacactgcctacagggcaagggctgcggggatactgggagatgcctggaccaatacggctgacatgcagataactattatgaactgcggcaatgaaggaatcattgacaccggcatgtccggcagcccttatgcggcgggaatcttcagctatgtcaatgcggtttctgcttctcaggttaccctcagcgactgctacaacgcaggggttgtgaaaaactctacagacggcggaggaatcgtgtctaatctgaacggcaacatgtcagttacgctgatccggtgtgtcaactatggcagcggactgaatccatcgggggatttctcgggcattaccggccgtacaaaggctgttatggaacactgtttcggggtgggaaaggctgattaccctctcgccagaacaaacaaaagcatgggaagcctgaattattatttcggatacgggaatgtgtcatcggcaagcggagggaaacggctggcttaccccagcggctgggactcctcgggctggggctcattatctaatgcaaataaaaagctgaatggctttgatttgaccttttcatccaatccggccgccggaaaaatctacgataatgcttctacggctcaacagctgcagacagcggcaaataagataaaagatatctgtaaggcgcccattgagaaatattttgcccagtattatggagctgttacattgggagaaccccagaatttcggggctaaagccaatggggatacctacaccgcgtcctggagccgggggaccaacggggatagggtatattattatgaactgaaattataccgggcgggagagaccgagcctgtgaaggtggtgcaggtaccgaaaaaccagttttcggccgaattttccatagacagtgcatggccggacggtacagccttttggattactctccaggctgtgagcggcaattcttccagaagctcgtccattttaaagacagaaaccttttacacggcagaatctcttcctgagccggagctggtatattatattacagggggaagctcctcccagattcagggatatttctcagtggctaatctggaggagtataagaaactgacgaatgacagctggcagattcacatcactacagatgcaacaggagagatgattcttgggcagtccaatgaaggaagggtatctcatacctttaattccggaaaaaggaatctttctactgtctgctgggcggaggacagcaccggaacctacaggacatcagctgtggtgtcccagctctcctatctccgatcaccgaagcagcttccgagggtggccagaacgatctacagttcaagcttatccggaacctccgtgagcgatatgaaataccaatttgaggttagaaacaataacaagggggactccttcggaatagactacagggcagagatgctccatggggatgagattttggcggagacatcggccaagattcaaaaggaaggtgcgcagactacagtttccctggattttgcggcgctgtccgaggaagaatttgagaagctgaccagggtagaagccgccggagagacgattaccatacgatattttgcgtggaccagcggcatcggcacatattatcagaatgtggagaacagtgatgcaagagccaacggctcttacctgaacggagacagatactatagtgtttctctggcccagggaccgtacgccggagaggacagatttacatttgttatgcctccaaggctggatctggtttccatcagcgacacgatggggtatgaggaaaccggaggaaaagacaggtatacattttcatggaactcaaaagcgccctggctgtatgatgtccaactgattggatataagagtgaaacagataccgagggagttgagattatttcaagaaaaggaatgacagataccacgctgactgtggacggaaccagctggagttacagccgggtaagattgtatgtcacccacagaggggtgagcggggaatccatagacagcaggcagtccagagactaccgaataaccagaagactgtcgccggtatctcagccgaaggcagtgctgccctccagagataacctgatttaccaggttacctggaaccctctcaccgatgaggaacagttgaagtgcttagacagctatctgctcacagcctccgcgggagctaagactgtgacagcttcggcaggtaaagaggataccagcttcctcctgaatttggaggaattcaatgcccatgacaggatttccattaccgttacagctgtctcagccgatacctccaggtatctgaattccagagccagtgttccggttaccgtagaactgccccagcggctgacaaagccggatccggataccacaggcttccagataactctggacccggactatcaggcagaatacggcgggggactgacggaggaagaattccgtctgaacggacttacccttagcgcagcggcggaaaccacagaggaaggcgcctatgcaggtgaggcatatatcacagagacggcggaagtggaggaaactccactgtatcagctgaattcctatacgatgaacggaagtctcaaatccgcagactataatttcctgggagtccccacggagtatgcgggcaaatacctgcatataagagtcagagcggtatcgaataacattgtatcttcccaatggagccagtggtatacgttccggctgccgaaggtgaagatagccacaccggacctgtctcagacagacagccgggaaattatatggaaagaaaaaactaacaatggagttaccacaggggaaagctctatcaaggcggtacacacggcacttgcatggaatggggttacctatggcagcggctaccagcttacctgggtaccgctggatacaggtgcggacacagcttatactgtctatctgcattctactgaagatccgggagagccttttgaactctggatgcgtcccgaggatatggatccggaattccaggaagttatccaggatgccggaccggcaggaaccggggagaaccggtatgtgaaactgccctccaccgtcagccaggaaaccgggcggacacggtataccttccagattccccacagttaccaggtcagcggaagggacagcgcagccggatatcagtatcagctgtatgtgaatccacagatacagtgcacggtcacagatgccggggatgtgagttttgtctatatcgcaccggatatgacagttcataatcaggaataccatatgacagcatcggcggtactgcgggcgtattcctgggaaaaaagtgagtacagagaggcttcctatccggtatcctggcagctcaaccggatcactgcttacggtgagtatatttatgaaattcaggaaacgctggatactgcagagagcgcgggccagataggacttctgccggaaaggtatgaaattcaggaaacgctggatactgcagagagcgcgggccagataggacttctgccggaaagggcggagataagagatttcctgacccaggagttgttcgacgatatcatggatagaaagcttaaggagctgctgtccgcggatctcctgaggggagcagcagaaaaaagcggggatggtgtagagaatgacaaggagtaaagggaaagataagctgtatgccgcctcccgaaaacgggaggggtatacaatgatcgtagtgctctgccttatggccctttttatggctcttgccctgtcgctgatcctggcctcctctgtggctgtcagccgggcaaatcaggcatacgcccaggaacagtgccggatatcggccatctcctttagcaaactgctggaagactatctggggcgtgataccaaccagttaactattggcatccgccatgagatagaaggccagaagtggccgtactatgatgaggacgatacctccggtgtgcataataagatgaatgccatgaagaatttttccgttgataccgctttccagcctgaggttgaggaaaaggcaggaacgttaaaggtaaagatgtattggcagaccaatgacgaggaggcagtgaatgatccggaacatccggagtatacggacagtgagctggtggtgatcgtaacctgcagcttcaggaagcaggaatacaatgtcaccacaagataccgggccactgttgaaaaggaaagcggcggtgaaaccggtgagaaaaatgtgtgggacggaacctggaacagaatcgggagggatgaataatgatacaaaataaaaaaggaactactcttgtaagtgtaatcgtttcttttgccattcttatgattgttattttactgttttcccgttcagtgactttatcactgaatctgtcccaaaaagctgataaaattctacaggagactacggaggcagtgaatacttactacacagggaccaacgcgcaggctacaccctgtattctgaacatgacagaggacggaggaagcggttcgtccattgcagtaaagttgaatccggaattctgcgggaagaacagtgtggatacggataaggtgatttattattttaccccccagggcggagagtagggaatgacaaatgaatgagctgaagaagacaaacggaaccacactggtggagttgatggtggcctttgccatagccggaatcttcatggtgtctgctacaatgctgatctcttcgtttaccaatgtctatctgcgcattatcaacagaaaccgcattcaggatatcagcaatgttgtaatggaaaaggttgtggaggagctgacttatgcatcggaaactgccacggaagtggatccagacaagataaagggaagcgtgatgctctccggggaggacggcagcgggaattatcttgtggcagaatacagcaacaaggacggcaatccggtgcggatgagcacacaggcagacggggagggaaaccagaaaggacttcttctggaataccagcccatatatgagaataattccccggatggagccatcctctatgaaggctcccagtggtatatgggtaagggcttctacaagaaaaaccaggtggacctaaggttcaggaagatagagaatacggcgtgtattgaggtaatcctaacggtatcggatgaaaaaggccggtacaaaaaaacaacagaaaaatgcgtggaatgtatcgatctggacccgaatgatgtgcagggggaaggcggctgatgcatacacaatactgcaaataatatgtagaattgtgttgatttccaaactcctttttgttgacttacacaggagagtactgtataatttttgttaagaatatacaatttatagaagttataaaatatataaactgaattaattattgagtgatttttatgaacagaaagtcagctttgaacatagagttaggaataatgattggtgttcatcaggtacggaaaggcttctaagaagaatttaggcgcaaagcctctgtatctgttttataacgtcacgagccgtggggcgagggcgggaacatatagaaaaggagagaaaggaagtagatttacatgaatgtaatgaaaaaattgaaagattccaggaagaataaaaagggttttacgctggttgagttgatcgttgtattggtaattttggcgatattaatggctattttgattccggcgttgactgggtatattaggaaggcacaggataaacaagtgctggcagaaggaagaaatgttttaatggctgcacagactgcattgtcagaacagtatgaggctaaaactgacactggaaagattgcagatgtggcagctgatatagttgctgagatttcagatttaactgatggagagttgacaggtagttatgaagtagttgctaaccctgatacgtataaagtagaaagcttaaaatatgataatggcaaaaaagtggccgtttattctaccacaggcgctaacaaaggatggaccgtagaaaaatcttccgaggcaggcgttggtgatgacccggtagtaaaggcaagtactccaaatccgccggctggagaataattaagttaattagtttatgaaactaatattaaaaaagagttttgataaagcaggattatcaagaattgatatactggtacttagtattattatattagttctcaccgcagtgcttgcgcccactgcccgatattacatgcaacgcgccgacgccagggctattctgacggaggcaaaatctgcgaagatggcagcttacgtaaccgctctcgagcacgcaacagaagggagccctttccaggaccagtctcagccctatggctttgcaaaaggcgtggaggaagaagtagttgagcttgccggctgtcccggagaggtttatttgcagcagtatgatgcagcaaagatagagttttacaaactgctctatatagaaggcgcatacactgtgacctactcgcaggatgaggaaggggaacattggaatgtgtattattcgaaacacgtaatacaacattagaatatttcctgaaaagttttacaggctactgctggtttggacagcagtagcctgtaagagcttatattgagacataacttttaaaccaggagaccgtatgttatactttttagagactttattgtttgtattgatatttttattcggcgcctctttcttttcttttttgaatgtggtaatctaccggctgccggggaagatatcttttgtggggggaaggagcttctgcccgatctgcggggagaccttaaagggacgggacatgattcccatactcagctatctccttctaagaggaaagtgcaggaactgcggggcacctatatcccccagatatcccctggtggaagccctgggcggatcttttagcgtcctttgcctgcggcaattcggaaataccggggaaggattttatcagatcacgctgtctgcagttacagtgtttactttcttatccattttaacaacagttgcttttatagatatagataccatggagatacccaatggattggtgcttgcggcagccggctgcggcctggtttcagtttttgtgtttcctgatatcacattgctttcgagaataatcggagtattctccgttagtgttccgctgctgctcattacccttttgattccgggggcgtttggaggcggagatataaagttaatggcggcctgcgggctgtttttgggatggcagttaagcctgctctccctattcctggcagttttgagcggagggctctatggagggggactgctggcttccgggaagaaagggagaaaggagcattttgcatttggcccttttttgtgtgccgggatgggaattgcttttttttgcggaaatgagatactgaactggtatctgggattttttcgattttgacaacaaagaccaaaaagtaaaggcaggtgaacggtttgccaaagtataaatatcgggccagaggactggacggtacggagacaaaagggtatgaagatgccgctggggaagaggagctgtacgaaaaattaaaagcagccggacagattttgatctcctgttctgagaaaaaggaaaatcgctcagagaaacggttaaagccggctgtcctggcagatttctgcagacagctggggacgcttctcacagcgggagtgtcgttagtacgggccctcaatatcattgcccaggaaaggaatctgaagcccagaagcagagggatctatgaaaacgtgctccggctgattcggcagggcgttcccctgtcggaggctatggaatcccagggtcctgctttcccggagatccttatctatatgttccggtccgcagaggccagcggcagtctggacaaaaccgccatacgtatggcagtgcactttgagaaagagcacagactgaacagcaaagtgaaaaatgccatgatctaccctttgatcctgattgttatggttgtggcggtggtaatatttattgtatcttatatcattccccagttttcagaagtgtttgacacaatggaacagctgccgcttcccacccgcatggtgcttgggatcagcgataccatcaggagccactggctgctcatcggtattatccttttaatcgcaggggtgattctctcttttgtcctccggattccgcaggtgaggctgggaatggatcagctgaaattaaagctccctgtgatcggaaaactgctgcggacaatctatacagccagatttgcaagaaccttaagttctctgtattccagcggcctgcccattatcacagctctgcaggtgggaaagaggacggtaggcaacacctacatagaatcccagtttgaagcgtccatacgttctgtgcgggccggagagacgctggccagttctctgtcattgattgacggctttgagaaccgcttggcttccactatactcataggagaagagacaggaagcctggacagtatgctggatgttatcgcggatgctctggaatatgacgctgagctggcgatcacaaagcttaccacactgctggagccggtgctgattattgtaatgggcgtgatcataggatttattatgattgcagtcctgcttccgattttccagtcctactctgccattgagaattccgggggagagtattagacggcccagaatgcggggataccggatttgtctaaattaccaggaggaatgataacacatgacaacatctatatatctatcaaataataccatacagattctgaccggggagaagggaaagtgcagcaaagtggagcatttatattgctttgacctggaagagggaaatctgatgaacggagtcattaccaatgaaaacggacttcagcaggagcttcttggactgtggaaggagcataatctcccggtgtccaaggtatctctggtgatcgacagcacccattttaccaccaggctggctacccttccggtattgaaggagcagaaaatgagggagctgttaaagagagaattttcggacatggattctcttcaggatcctctttacgattatatgcctctggaagagaaccggggagcgaagatggggaaggtcatgtgcgccgcagctgagagaagctttgtcggcagttttgtggagttgtttgaacggatggggatcagcattatctctgtaaagcctgctctgtgcagtgcggttcgtctgctgggtgcccatgaggcgctggcggagagtacctgcattattcttcttctggatggggataatctggtaagtgcccttcttgtgggcggaaagtatgtgtattccagccgtgccaggctctttagtgagcacggtacaccggaatttgccgtggaagtggcgagaaatgtcagtggaattatgcagttccatacgtcggagaaacttgaaaatgtaatcacccacgtctatctggggggattcttcggaacagacgagcgtttgtctgcagagaatattgcaggactgggactggcggtggagcggcttccggagacaaagcggatccagatgccttcggagcgggaggtttatgtggagacaaaaatggggtcccctgcgctctgcgattatgtatatgcggcaggaaattttatcttgtaagcagataagactcccacccctataggtggtgagcaaaaaacaaaatcgtcttggtgggagtccaatctccttccaagataaagcctccggcggattgcagagctgcacagatgtattatgtcatgcagagcatgacgtgcagctcgcagcaagtacgccgaggcgtacttgaatcagcaggcagaatccagggaaaatgaggtgtacaaaatgagacaggcgaataaaaaggatattaacttttatcttcaatttaagaagaaccccaatcaggagcagatgaaaaagaaaatactggctattgcggttccgggcggtgttcttgttggtgtctgcgttgcggtatcgctggtatttctgatttcgaatctgatgctccagaataagctgaatggaatcaatgcgtatctgaccgatgaaacaaatctgcagaaatacgatgaggtgaaggccctggagacggagaactctgttttggaggcttatatcgcgtcagatacttatgcatggaaggcgatacagtcttatcccagagccaacagcattgtggtaaatgagattttggcgtgcgggcagggaaagattggcatacagattaacagctatgatgccaggaccgggatgttccagtttacggcaacggcagccaacgctgaagagtgcaatgcgtttattgccgcactgaagaactctgaggtttttgcagatgtacagtattccggatatggctacgaggacagccggcagtcttaccttattaatgtgagctgcttcctcagcgagacagccggcaggcaggagggataagcagtgacgacaaaattgacaaacagggataaagttcttatcacggttttaattgtattcgttgtgatcgcgggcttcgttgtgtttatcatacttccggccgtggacaagaggagtgagcttcagcagcagattgagcaggcagagacggagaagtcggagatggagtcagagattgcactgcttccgtcctaccagaagagaaaagaagaaaatgaggcaaaacgccgggaactaatccaggatttgtatcctatgatggagaatcaggagattgacaaaatgatcaccaatatgattctggatatgggccttatggcaagagattttacagtgtcggtccgcccggagaacaggaattttacgccgtatacagcctcggccatgggaatggaggaagcgcttacccaggaggagggagcccaggacagtgaaaaggataccgccggaaatgaaatctatatctcggatatcacagtgacggcaatcggaagcctggaaagccttcaggtacttatagacagtgtcaccaatgagtatccggctctcagagttgtgagctataccattggagataaggatgcgctgatcctggacacagaccagagcgtacgcacacattctacgctgaccattagtctggagatgtatatgtgcagcaaatagagagaaaagaatgcccggggcatctatcatacttgccccgggcttggttcggaggaaatgattgtgaagaatattcctattggagaagtgctgaaagagtatggctatatcaccgaagagcagcttcagagagctctggcatatcaaaaggagcatagagaaaaacgtctgggtgctattttgatggaactggggtttgtgacagaaaagcagatgatccaggctttgggacagcgccttggaatgaaaacagtggagctgagccagattaccgtgaatattgaggctgtggagaaggtgcccaggcagcttgcagcccggtaccacgtgctgccggtggacaccgacgggcagacccttacgctggtgacaaacgatcctttgaacttctacggtctggaggacatccgtcagttgacagggatgaatcaggaagtactgctggctgaacttgcccctctgaataaggcaattgattactactatgcggaagtaaatgcccgtatggcggcaaaggatgccaaccagagcatagaagagccggtgatagaagagcttgaagtggaggacggcggcggtgatgtgcctgtaatcaaactgctgaacagtctgattcacaggggatatcaaactaactccagtgacattcatatagaaccttttgaggacaaaaccttggtgcgtatgcgtatggatgggacaattgttgactatgtgaccctgcagcggtccctgcacccttcgcttattgcccgtattaagataatttccaatctggatattgcagaaaaaagaatccctcaggatggccatttccgcattaagattgaaaatgaaaatgtgaatgtccgtgtgtcggtcattcccacggtgtttggagagaaggcagtgcttcgtcttctggcgaataattcagtgattgatcatgccggacagtacggaatgaatgatgagaactataataaattccgccggatgcttcaatctcccaacggtattatttacctcacaggccctaccggatcgggaaagactacgactctgtatatggtactggaggagctgtgcaaaaagcaggtaaatatctccaccattgaagaccctgtagagaagaacctgacgagagtcaatcagatgcaggtcaataccatggcaggtcttacctttgaggttggccttcgggcgcttctccgccaggaccctgatatcatcatggtgggggagacaagagatgcagagactgcttccatctccgtccgctctgccattaccggccatctggtgctctctacccttcatactaataatgctgtgtcttccattgtgcgtctggtggacatgggcttagagccttatctgatcgcaaactctctggtgggagtggtagcccagcggcttatgagaaagctgtgcccacactgctcctatgaagatatgcttacttatgaagaggcagccctgctgggaacagacaggaaggctgtgcgcagggccaaaggatgcaatcgctgcaatcacacgggataccaggggagaatcgccatccatgagattctgctcattgacaaagagatacgcaggatgatatctgctggctccgccatggaggaaatttctgcatatgcactgaagacacaggggatgaagactctgaaaaccagcgcattggagctggtggaaaccggggtgacgacgatagaagagctgatgaaggttgcctattatgaatagagagggagactgctatgaatgaaatctttgagataatccaggaagccaggaaaagaggagcctcagatatccatatttcccagggactgcccatgctgttccgcatcaacggaagtcttggggaggccgggggagcaatggatgaggggaagaccagacaggtgattctttccatgctttctctggaacaaaaagggctgttggagggaggggaggatctggactttgccgttgagacaccggacgggaaccggcagcgtgtaaatgtattttgccagcaaaagaagtatgcggctacgatccgtcttttgaacaaccagattcccaccttggaagagcttcagcttcctaaggtgcttcgggaactggcagacaaacccagaggtctgattctggtgacaggtcccacgggaagcgggaaatccaccactctggcagccatgatcgattatattaaccagaacagagcagaacacattattaccatagaggatcccatcgagtatgtatacacccgcaaactgtccctgattcatcaaagggaagtagggtgcgatgctcaatcctttgccacagcccttcggtcttctctccgggaagatccggatgttatcctggtaggggaaatgagggattatgagacgatctcagctgcccttaccgctgcggagaccggtcatctggtactctctacccttcatactaccggagctgcccagaccattgaccgtatcattgatgcctgcccgggcgctgcccagaaccaggtgcggactcagctttccggaatactggccggtgttgttacccagtgtctgatcccaagaatggacggttccggcaggatcgcggctacggagatactggtgggaaccgatgcggcactcaatctgatccgggagaataaatgccatcagatgaataccattatgcagtccggtgcttctgtggggatgcactctctgaacgcagatctggccaatctggtgcggaaaaaagtaatcagtagcagcagtgcgtttaagtattccaatgaccgaaaggacctggaacaatacctgacattttaaaatgcccgggaattacggcagaacaaaaaaagaatgtgaaaaaaatgtcagaaaaatgcttgaactactggcaatgataagaaatatcatttataatagaactaatgcggcggtcctctgcagggccgccatattgtttcgacaaatttatttaagaaagaaggaaatcctatgtacgacgttatgtccaaaaaagctacggagtttatcaatcatgaggaaatccttgacactttagaatatgccaaggcgaataagaataaccgggaattgattgattctctcattgagcgtgcaaaagactgtaagggtctgtcacatcgggaggcagctgtcctcctggaatgcgaagagcatgatctagtagaaaaaatgtttgaggtggcaaaagaaatcaaggaaaggttctatggaaaccgtattgtcatgtttgcccctctgtatctgtccaattactgtatcaacggctgtgtgtactgtccgtaccattccaagaataagcatattgccagaaaaaaactgacccaggaagaaatccgcaaagaagtaattgcactgcaggatatgggacataaacgtctggccctggaagccggtgaggatcctaagaataatcccattgaatatattctggaaagcattgagaccatttatggaattaagcacaagaacggagccattcgacgggtaaatgtaaatattgcggctaccacagtggagaattacagaaagctgaaggatgcgggtatcgggacctatatcctcttccaggaaacttatcataaggaaaactatgaggcgctccatcccacaggacccaaacacgactatgcttatcacaccgaggccatggaccgggccatggaggggggcattgatgatgtaggattgggggttctctatggattaaatacataccgttatgattttgtgggactgctgatgcatgcagagcatctggaggcagctatgggggtagggcctcataccataagcgttcccagaatctgccctgcggacgatattgacaccgcagacttttccaatgccatagatgatgaaacctttatgaagattgtagctgttatccgtatcgcggttccctacacaggcatgatcgtttccaccagagaatcccagagagtgagggaaaaagtcctggaactgggaatttcccagataagcggaggatccagaaccagcgtgggaggctacgtagagccagaggaagagaattccgcccagttcgatgtaagcgataccagaagcctggatgaggttgtgaggtggctgtgccagctgggcaatatccccagcttctgtaccgcctgctaccgggagggaagaaccggggaccgcttcatgaccctgctaaaatcaggacagatagcaaattgctgccagcccaatgccataatgacattcaaagaatacctgatggactatgcctcaccggagacgagagagattggagaaaagcagattgaaaaagaactttcccatgtgaaaagcgataagatccgggagctcacaaaagagcatttaaaggatattgaggaagggaagagagatttcaggttttaagtacaaaagggggacgtgttctttctagaaagaacacgtccccttttgagatcagggtgtcccagattcggaaaggcctgtcccttttttatatttcttcccgcagaaccaaaagaaaatgatgcctgccagaaaggtaaagattgagataaactgggaggtggacagcgcacccacacttccccggattaaatctccccggaagaattccaggataaaccgtcccgcactgtataagatcagatacagagcagcgatctgcccgtttgcctttactttttttgccagatagatgagcaggaaaaagtggataaagttcagcgcactggatatgagctgtgtagggataaggggtactccattgggtgcaaattctgagctgtggaatgtgatgctgagggggcaactggattccattccgtaacagcagcccgccaggaagcatccgatgcggccgaaaccctgtgccagtgcaacggaggggatcaggatatcaaaatattggagaaaattaagtttcttatatctgctgtaaatataaaaagtaaggattcctcccaggattcctccatagacaacaaatccataggagagatccaaaagtactttgggattttccagaatttcttttatatcggtgataaaaaagagcagcttggctcccagcaaaccaccaatcagacagagaaaggtgatggcaaacacaggttccgggttcagattgtttttctttgcccgatattcccccaccagataggcagccagaacaccaatagcaatcattagcccgtacccgtggatggtgagtggtccgatactgaataagtcgtttttcataatatagtcctttgcttttctttttattattccggatagattaatcgatctccggtaatacctgtgagtacttccctgagatacttatctgccagataattggccattcccaggttcatgtccagatagttgccgcagtccttagggcttgcaccgggaatctcaccgcggtaatctctaataaattcaaacataccggtcagaagctctaaaatgtcggtggactcataatcccctgccagaagaagataaaagccagtgcggcagcccatggggccaaagtaaataatcttatccttaaagtcaggatcgttccgaagaaaagtggcgcccagatgctcaatggtgtgaacctctgcagtattcatgacaggttcgtcattaggagcggtcatgcggatatcaaaggttgtgattacctgttcacccaccggatccttgcgggagacgtagacacctggttttagttttatatggtcgatggtaaagcttgtgattttttccattttaattctccttttttcgttagtatatccattataatgaattgagggcattcgtgcaacccctccattgactttccatatccccggtgatacaataaaacctagcgaaaaagccggcagaaaggcccgagtatggaggaaaatcagatgatcaacgacaagaaaatattatttagcggtatgcaggctacaggaaatctgaccctgggaaattatctgggagctttaaaaaactgggtgaatctgagcgacgaatacgaatgtttctacagtgtcgtggatatgcactcgattacggtacgtcaggatcctgctacccttagaaaaagagccagagcacttctgactttatatattgcagcaggcttagatcccaaaaagaactgtatttattatcagtcccatgtatctggacatgcagagctgtcatggattctgaattgctttacctatatgggagagctgaaccgtatgacccagttcaaggataaatctgcaaagcacgcagacaatattaatgccggcctcttcacctatccggttcttatggcggcagatattctgctctaccaggccgatgtggtaccggtgggcattgaccagatgcagcatctggagcttacgagagacatagccatccgttttaataatctgtacggtgatgtctttaccgttccggaagcatatatcggcaaagtgggtgccaaaatcatgagccttcaggaaccgggaaagaaaatgtcaaagtcagatgagaatcccaacgggagcatttacctcatggacgacccggataccattatacggaaatgcaaacgtgccgtcacagattccgaagcctgcgttgcttacagggatgagcagccgggggtgaaaaaccttattgacatatatagtgcatgtacaggaaaaacacctgccgaagtagagtgtgagttcgagggaaaaggttatggagactttaagatggcagtgggtgaagcagtggtaagtatcctgaagcctctgcaggacagagtaaaagagttagaggcagacaaagcctatatagactccatcatcaaagaaaacgcagataaggccaactattatgcaacaaaaacacttcgaaaagtacagaggaaagtaggttttccggatcggattcgttagacttgaaaagggggacgtgttctttttaaaaagaacacgtcccaaaatcgtcccggggtgtcccaaattccaattgacctgtccctaattgccgttgtcacaggtcaaaaaaagagctataattaagacagcaagaaagtgacaggaggtaatgaatatgacgattgatgaggttattgccgtactgcagatgcaggaggagattcttcagtttaaccattttacaaatgaagatgcgtgggagcttggaaatataattgtttctgaagctaagagaagaggactggatgtagctgtcagcatccgattgaataatggatataccgtgttccagtacgcaggaaataccaccaatctgaatgatgaaaggtggatgagaagaaagttcaatactgtgaagaccatagagaagagcagtctcaggttatacagtgaactgcagaaaacaggggaatctatggaagatttgttcctggatgagaaggaatatgcctgctgcggaggcggttttcccattcgggtggaggaagtgggtgtgattggtgccattgtagtatctaaccagaaccattttgtgaatcatgatattgtaattaagggcgtgagccggtatcttcatattgacgaggtacccaggatccgtacggttggaatgtaatagaatcagaggcaaaaaatcagaaggaagctgtgctcgcctgcgcagcttccttctgattttttgcctctgattctattacattccaactgtacgctccattgccttagcgcagcactttgcatataatccggccgaactacttgtccaaccctatcctagtaaggaggagcggtgagaatacgtttcatatcctccgggatatcgtcggtaaaggaaagcatctgccgtgtaaccggatgctcgaattccaggcggtaagagtgcagcgcctgccgtttgattttccgatagtcagggttgtagaggtaatccccgataagcggatatcccagatatttcatatgcacccgaatctggtgggtccggcccgtatcgagctgaagttccaccagtgaataagaatccccagtgtctgacccaacagcagcaatcctgcgaaaatgggtgacggcccgttccccgcggtgaaaatcaatctgccgttccatggcagagccttcttttctggcaataggggcgtctatggttccttcttcggggggaatcccccttaccacagcccggtatgtccggtgtatctgccggtccagcatcatctgagacaggacagcagcgcttagcatatgtttggcaataatcagaagacccgtagtatctctgtcaagacggttaatacaccggtagacaaaagtttctccctgctgctgatagtagtaagcaatgccgttggccagcgtgttgtcataattattcagtgatggatgaatgggagtgtctgcctctttatgaatgatcagaatatcttcatcctcatacacaatggtcaggggcatagatacagggagaatgttgggggaggaatcttccggtgccagatagaccgagaggaaatccccctctttaagtaaggtccggacatatgcccattggccgttaaccagaatcccattctgggtttttttcagatggaccaggacatggcgtgagtagcccagcttccggagataagaacccacatctgcgcctgcgtcctctgctgtgatgctataagtaaatgttcttttcataatagttttcattcacgccggataaattttacagagtacgtctgcatcttatagaaaggcgtggattgccctcatttctaccagttcatatcccacgcggtttccgctttggggtctgtggaattacgtatgattagtttgccgtccaaatttatcagcattctggaggcggaaaggttttccatacggcgcatcagcagattaaaggccatagtccccatctcttctttgggaacgcgtatggttgacaaagaaggggtaattagggaagagggaaaattgtcattgaatccaatgacggcaatgtcctcagggatttttaaacctgcttccataatcgcccgcatggcgccgatagccatctgatcatttcccgccactacaccgtccagtggaagatgggtctggagaagcttctgcatacagcggtaaccgctgacgggactgtagtctccctccgcaatcagacgttcattcaccggataatgatgctcttccagagcattgatatacccggctttccgcagcttgcccatagtaaactgaaaaggggcggcaatatagccgatgttctttttcccaacggcaatcagatgctctgccgcagtttttatccccgcagtatcgtttacaacaaccgcgtccagcatatcgctgatggcagcctccagacagacaacagggatagagtgcccgtttgtgttgagagaggtaagcatatggatatactcctgggccttggggctttctgtatccagagaggaggaaagcagaataccgtccacccactgagatttgagcagctggatatactttttttcctgatccaggctggaatgggttccgaatacactgatggtataatttttctcttccgcagcggtctgtatgctgttcaaaagcgcaggaaagaagatgctgttgatggaagagacaataactgctatattgttcgtttttccgcttttcagcccacgcgcaatcatattcgtctcatagcccagtgcattgacggcgttcataactctttccctgagttcatcacttactgtcttggtgccgttgagaacattggaaacagtagagatagatacctgggcatatttggccacatctttaatgcctatgggcttttttggcggattagcattcattttctttatacaactcctttacagcagacagccaatgggaagcggtaattcccttatctggataatattggcactcagcactaatggttttattataattacagtcttttaaaaaagcaacgatttttttgaaatctatgtgcccttgtccgggccagctgcggttcgaatctgcaaagtgaatataatagatatctctatagtgctttgcaagagaatccagaatatccttctcttctatattcatgtgaaaggtatccaccattagctttacatttgtgcaggcatttttatgtatgaagtcagacacatttataatggggagatgggattccagccgcttgtacataccttctgtgcattcgcctccagaagatgctatgatcaggtgtttttatcctgtggatacggtcagaacagcattaccataatcggaagtgatcctggtgtctgcgctgcttttaatgggggaacccacactgcctttgaagatatggcactgttccgtgccgtccctggctctacagtcatagatatttctgatgggaatcagctgatcagcgcattaattcagacaggaggcaaaaagggggtgacctatatccggacacccagaaagagtacggcaaagctctacggcgattattcccatatgcctgtgggaaaaggaatattactcagaaatggaaaggatgctgcagtatttgcctgcggaatcatggtaagcgaggcaatgaaggcagcggagcagttggaaagagagggcatctttgtttcagttattgatatgtttacggtaaagcctctggatgaagagtgccttctgcggcatgcgaaagctgcgggccttgtagtgactgcagaaaaccataacaagattggcggtttatacagtgcagtgacagaagtgttggcagagaaactgccggtaccggttgaatatgtggcggcagaggactgcttcggagaagtaggaccccaggaatatctgcaggaaaaattcggattaaacagcaatgagatagtaaaaaaggtgaagcggggattactttttaaaatcccgaataatccgtatcagcagaaataccccataagcggataaaaaggtttcagaaataaaacctgcataggtgattcctctcgcgtggaacagtgagtttaacagaacaatagctggaatttcaaatatgattttgcggagtacagcgaaaagcagagatttctttcccatgccgatgctctgaaatacactcactgcaagaaagtccaccagcataaagggcatcgaaaggctgaagccgcgaagaaacagtttaccataggcaactacttccctgcttttaataaataggctcattaacggcgaagccagtatccaatagaagatagtaatgaccagcatacatgggaccatgatttttgcgacagagctgattgcctcctggaatctgcggatattcttacctgcataagaatatccaatcaatggcattactccctgggttccgcccatagcgatttgaatgggaaccatgaagatttttgggagataccaatcgctgctaccgcagaagcaccataagcagcaacaaaattattcataaccgccatacctgtgacatttaaaatgttctgaatagaagcaggaacacccacacctaacacccccaaaacaatctcttttctcagggaaaggtacttgggactgagacagatattcgttttgtctttcttaacagccagaagaataaaaaaatacacgcaggcggagcaattggaaaggaaagtggcaagtcccgctccggctgcgcccattccaatccccagggcaggataaagataggatcaagaataatattcattatgcagccgctcatagttccaatacttgcatatctgctgctgtggctcccatagtatccgctttagcccctaacaaaggtatctcccctaccaagtgcgcggctcatcatactagaggaaccaacgccaaaaagattaataacagcattgaagccgagcattgcgggagcggccagcgcaacagccgcactacgggcatttcctcaaacaatcttttgttcgctgtgtccatatgtactactctcctgtttaggtgctttaccgtgcagattactttctatcctgctggataactctaaaataagcaatcgctcctcttttgaaaatcccgcaaaaataaattctaaatattccctttgcatcgcctgtccggcatgaacaatctcttttgaggattctgtcagttttaaatggatctttttatggtttaaagaattcgtttcacacgtaagataccctttttgcgttaactcttttacggcaagggaaacatgtgatttttgcatttttttcagtctcacaatatccgcagaggtatcgaagcttttattatttgcaaggaacagtaaaatgtctagttcggcagaagatatttgaaagcggtttatgacagttttctttcggttgaaatattcttttttgagtgatgcgataagcagccaataatcgttttccattacgccctcctgtgttgaaatgccaatactaaaagtatagttctattttgaactcatgtcaacaactggaaagtgagaatttttaaggtttccgttgtagaagtctgcccgagcaggagttggaaaaaggatttaactggatactctacggagcgtttgttgcatttatctcaaaacaaagatatgattaaggaggaggtgaagaaaatgaattgcagcaaagttggtaagctgatacttaccctgcgtcaggaaaagggtatgacacaaaaagctcttgcagatgaaatgaatattagcgacaggaccatatccaagcgggaacgcggtatcggctgtcccgatgtatcgttacttcgtgagctgtctgccattttagaagttaacattgaaaaaatattagtaggcgatttagaaccaaacgataaggacagagggaatatgaaaaaaataaagatttatgtttgcccggattgcggaaatgttttactcagcacgggagaaaatgagatatcatgctgtggcagaaaactagccgctttgattccgcagccagaagattcacaacatgaattctgtatagaagaaattgaggatgatttttatatcacgttgcagcatgaaatgagcaagcagcattacattacttttgtggcatatgttgcttgtgacagggtacttttgatcaaactttacccggaacaagccgcggaagtacggtttcctaaaatgtacggcggtgatttttatgtttgctgcaataaacatggcctgcggcacaggcgtttcaccacataatattgattcctggataaatacatctgatattaaaacagatgtattttttctgtgtgcgctgttcacggccaggcaagggttgtgtggtaggttctgtggatggattatatgcccaaagtgcgagaatggaattgtgtaaacaaaagtggcagccaacattctttagcactttaaaagacttttatgttgttagaagataaggtttcctgcagttttccaatgaatttttcggcaggttttgagaaaatctggtattttttccaaatgatattaatttcatcttccagcccaggagttagtggacggaaacaaaggctgctgtttccggaggtattgataattttatcaaaaccaatagcatatcccaacccttcttctaccagtaaggatgcattaaaaataaggttataagtggctgcaatgttcaaatcggtctcttgaagcttcagccactgcatgatcttcccgcctttgtattcctgctgggagaggattaatggtttatcccataagtcctccggcgatattttatttttggatgcgaggggagaatccttccgcattaagactccccagacatctttagaaggtaatctgagtgtattgtattttttcaaatcaaccgtcccaaatataatcccaaagtcaagcagtcctttatccagacgttccattacaaaggtggagttgccgctggagatatggcagcgaataccgggatatgcattctgcagaattttagctgttctcgctaaaattcgtaccgcatcagtctcacctgtaccgatataaatatctcccataacaatatcgtcggagagggtaacctctttttctgttttcttcaccaaatcaagaatctcttcggcacgttttcgcaaaatcataccttcctcggtaagtgttactttacgtgatccctttgtgccgcgtatcagtaactgcttacccagctcttcttctaagttcttgatctgagtagaaagtgtgggctgggaaagatggagtgactgtgctgcgcggacaatgctctgctcccttgcaatcgcaagaaaatattggagaactcgtaattccatatggtgacctcctaaatagaaacttatttttataagtagtttaggtaagtttaacataaaaatgaataggtttcaactatatatagcaattatatataagtatttgctattatatgacggcggaattatactatacatagagcagaaatggtataggaggtgccgcgcaatcaatgacgaataaagaacctaaagaagagatcgtccaaaatctgaaggacgctgggtgtggaatagagaccattcaagattttctattatacttaaatgaaaatcaaaaagaaaaacaactggaactgttggaaaaacataggagacagcttctgagcaacgtgcatagagaagagaagaagatttactgtctggattatttggtataccaaattaaaaatgaggagaagaaaagatgggaaaaaatattttaatcatatcaaccagtctgggaaaagggagcaattcagaggaaaagttaaacgaactaagggaatttgggctgagcctataaaagagaaaaggagattgtaaatcatggatgcaaaaatgttagaaggaaaagttgcggttattacaggtgcaagctatggaatgggacagactatggcggaactttttgcagaggaaggtgccagtgttgttctgaccgccaggggtaaggagaaactgaatcaggtagtagagggaatttgcaaaaaaggtggaaaggctatcggaattgttgcggatacctgttctacagcagatacgaaaaaggttatagagaaaacaattgagacttttggagatttagacatcctgatcaataatgctgggattggagagcagaagatgattgacgagacagaggatgaatggatgatgcaggtaatgaacaccaacctggggggacctatgaggtatatcagagaagcactgaaaatatttatacctaaaaatgaaggggtcattatcaatatttcttctgtaaatggaaaccgtcccttctgcggtgcaacttatacttccacaaaaggtgcattgaatacgttgacaaaaaatgtggctatgaggctgattgacacgaatatcaggtgtaacgccgtagcacccggggcaaccatcacaccggcgcaccttgccaacaaggcgggagagcagccgggaggaaatgaaatgctgaaatacagcagccattatgtttattttcctgggccggaatgtgaagcaatggatcaggcatatgcctgcctgtatcttgccagcaagatgggcagagctgtccgtgggcaggtgctgcaggtctgcaatggtgcgtttctgtaaaatgataatctttgcataagaatggtaaaacaagatgctgtataaagaatataaggatagtatccgcatttccagattgggtatacactgcttgagacaggataccgggttccgtaaagatacaggataaaggagagcattgtattgacaattaagaaaaaaatcaggctgtccaatattatgatggttctgataccgattatatttacagcagtcgtaatcaacgtctgcctgcacacttcacttggtagcttttggtataccttggaagccatgtacagtgatgagaacagcatacagttcgcccagagcatgatctatacataccagcaggagctgtgggagaacaactggggccagggggaacatccggatgcatcagaagaaatcaagagaagtgatgaaatgtaccatctggaaaataagctgtccggaatgggatatcagtttatgatcacaaaaaatgagaaactgatttatacgaacctgtcggaagaagatatgcaggccgcacggtcggtagcaggagatgccattgatacggcaaagacattgactgccagcaggcatgaagtctctgtcataaaaaatacattttaccacggggaaaagacgttctgcattacagcagttcaccgccagcagacggatcagggggtggtgaattacctgaagaattatattctcaaatatttgtatgggattatcctcttctttattgtattgacactgcttgtgaatgggatcacatcctggtggatatccggaagtatcttaaagcccctgaggttgctcagcacaggtacaaaagagattagggaggggaatctggatacccgtatggaataccagaaaaaagatgaatttgggcaggtatgcagggattttgaagagatgcgcaactttctgaaagagtctgtagaacagcgtctgagagatgaaaagaaaaggcgggctcttatcaccgggatttcccatgatctgcggacacccctgacctcaataagcggctatctggatggtttaatggacgggattgctgacacaccggataaaaggatgcgctacctgcaggcgattaagaccagaaccggaaatctggtgagcctggtagacagcctttccgagtacagcaggctggataatggattccggtaccacatggaggcggcagatttcagggagtttgtagagcaatatctggagaccttaaaacctgacgcagaacaaaatcagatagagattgtattttcatatggaaaagaaacttatccggtgcggattgaccgggaagaattcaagcgggtatttgacaatctttttacaaatacagtgaaataccgtactttagaaaaatcacgtgttcagatatccctggaacgcactttgacagggacggatattgaactggtatatcaggacgacggccccggagtgccacaggtgagcctggaacaaatatttgacagtttttaccgggtggatgatgcaagaacccagtcagaaaaaggaagcggtattgggcttgcggtggtcagggaaattatcctcggacacagcggcagcgtgcaggcagataacagggaaggactggcggttatcatccatctgcctataacaggagtggataccaatggaaaaaatactgattgtggaagatgatgaattgattgcggaattggagagggattatctggaagccaatggattcgagacagatattgcttccgatgggagagcaggagagcgaatggcaaaagcaggcggatataatgctgttttactggatgtgatgcttccgggaaaaaccggtttcgatgtgtgccgggaattgcggaagaccctgcatcttccgattatcatggtgacggcaaaaaaagaagacattgacaaaatccggggattggggctgggagcagacgattatctggtgaagcccttcagcccggcagaattggtagctagagtcaaatcccatatccacatccacagcctgcttctttcctcccaggaagaaagggaagaggagacagctatcgcctatcagaacctcacgattctcccaaaatccagaatggtgtatctggatgacaaagagattgtgctggtgaataaggaatttgaacttttgcttttcatggccgagaatccgaatattgtattctctaaagatactttgtttgaccgggtatggggaatggattctctgggcgatgtggctacagtgacagtacatatcaaccgtctgcgggataagctgggaaagaatgtgaaagaaacgcagtttattgagacggtctggggagccgggtatcggttcaggattaattgacattggagattgagaaatgatagatatagtagaattcttagaatatatgaaatgtctggatatcgcattcatggtgtaaattaagaaacggtgccgctcgattcttgtttcgagcagcaccgtttcattttatacataaatccgttctgctttttaatttcatcggcaacagcctgcgtgtgcatggagatactaatacgcttcagcatagggtattttttagataatcaacgcactaaccgccctttctctcccggctttttagaagcgtatacatgaacggcaaaagtaaattgataaaacctattaaaaggtattatttataagtatttgttattcataattgcagatgctatgataaaagcagttaaggaatatgaaagaatcagtttagaaattgtttatctttttgttagcggcatgttattcccggggcttacagtattagcagatgaaaggagtgcaaaaaaatgaagaggaaactatacatagtatgcatgctgtccctggtgtttagtgcgttaaccgggtgtgcacaaaattcaaatatatctgaagatatggtacaggtaaaaacagccgaaagagaaaacatgccgaagaatatcatcacaccagatacaaagattacagaactggaggatggattatctgtcgtccgctatgaaggaaactacggatttgatgaatttctggagcagggcggtgcatcctccgacatgggtgtggtggaatatgtcagcggccggctgatggacaatattccggaaatcctttttggcggcaatcccttcggatgcagcaccctgtctgtggcaaattcagaaggcgggaatctgtttggaaggaactttgactggaatacctgtagtggactgatcatcagtgcccggccggacaacggatatgcctctgtttccacagtcaacatggattttatacaggcagggggcgatatctcgaagcttccggacgcggcgcaggcgattatcgggatgtatgcgccgctggacggcatgaatgaggagggatttgcagtatccgtcaacatgattgaggactctgacaccatagagcaggatacggaaaaacccgacattaccacaacaacagccatccgtcttcttcttgaacaagcggcagatgtggaggaagcattggatttactggaacaatacgactttcatgcttccatgggaatgatggttcatctggcgctttccgatgcggagggaaccagcgttgtcgtggaatatgtagacaatgagatgattgtaacagaaacgcctgttgtcaccaatttttatctggcagaggggaggaaaaacgggattggaacagcccagtcccatgaaagatacgatattctgaatgaaacggtggcagaagaggatgccatgactgaggcagacgtaagggatgcactggacagtgtgagtaaggataatttcggtgaatttgaatctacggaatggagcattgtcatgaatcaggagacgaaggaactgacgtattaccatagagaaaattacgaacagggatataccatttccgtagagtaaaggaggcgcagggagaaaacgatgaattatttaaaaacattgatagacttataccgtttgaagagacaggcgaaatttactccaaagcagatgcgcaccctgcaggagaaaaaattaaggaaaatgctgcaccatgcatgggaacactccgcttactaccggaggacttttgaagccgcgggaattacagaggggcagctggatgaacttcccctttcctgttttccgaccctaaataagaaagaacttttggggcattttgatgagctggtggtgccaaaggacttacgccagagggaactcagtgaatttgacgcacaaaaatctccggaccgcaagccctataaagggaaataccatgtggtacattcatcaggaagcacaggaaagccggggtactttgtctatgatgaagccgcatggtctgccatgctcctcggtatgctaagggcggctctatgggatatgtccataccgcagatactgtcccttctggcaaaacgtccaagaattgcgtacattgccgcgacggacggcagatacggcggggcaatggcggtaggagacggcattgaccaagtgggggcgaagcagatttatctggatatcaagacgccgcttacagagtggatcaggcaaatcaaagaatttcagcccaacatcatcatcggctatccgtcggcggtaaagatcctggccgagcttgtggagcagggaagtgtagaagtacatgccatacgggtgatttcctgcggggaaccactgggagcgtctcttcgaagctatctggaaaagatatttcagtcaaaagtggtcaatttctacggcgccagcgaatccctcaccatgggggtagagatagatccggaggatggaatgctcctattcgacgatatgaatctgattgaggtggaaagcggcgtgatgtatctgacctgcctgtataattttgcacagccgttgatccgttaccgcatttctgacagcctgaccttaaaggcggcagaagaaaacagcccgtatccatttacgaaagcctgtgggcttttggggagaaatgaagatatcctctggtttgaagattttgacgagagacgggagtttctgcatcctcttgccattgaaggcttttgcatcgaagggcttttagattaccagttccggcagattgcaaaggacgcctttgaaatgtatgcagaagcttcagaaaatgcagatgaaacgtacataagaacagagatgatgggacagatgaaaaagatacttgctgaaaaaaaattagattatgtacagttttatctgaatttcgtgccggagatccttccggatccaaggacgggtaagaaacccttaatccttcagaaaaaggaggcagtacaggatgaaaaaagtgttattgcagggtagaaaggtgagcaaggtatttgcacaaggctccgcaaaaaataaagtgctggatcatgtggatgtggatatttacgataaagatttcaccgttatcatgggttcttccggggcgggaaaatccacacttttatatgtcttaagcggaatggatgccgttacggacggaacggttacttataaagaaagagaaatcagccgtctgaaagaaaaagagatggcgaagatacgggcggaagaatttggttttgtcttccagcaggcccatctggtcagcaacctgacgctttttgagaatatagaggttgcaggcttcgtaagcaaaaaggaaaataccggagaaatacaggatcggactgagcacttggtttcccagatgggaattgagaaggcaaagaaccgcctgccttcccaagtttcaggcggagaggcacagcgtgcagccattgcaagggcaatgataggcagccccggacttttgttcgccgatgaacccaccggcgctctgaaccggtcgtatacggaagaggtcttaaacctgctgtctgcaatcaatgattccggacagagcattttgatggtgacccatgacctgaaagctgccctcaggggaaaccggatcttatatctggaggacgggaaaatcgtggacgaactgaaactgcccccttaccaggaggcacaagagcgggaacgggaaaacaagcttcagaactggcttttggggttacagtggtaggaggcacgagcggaatatggtaaataaaattatatgcatggcggggatgaaacgccataagggaagtctttttggcattgccgtactcttgtttctggccgccctctccctgacttgtgttctcaccgtctatctgggagatagaaactatatccgtcaggaaatggagcgggcagggttcgggaaccttaccgcatgggtatccggcgttccggatatggatgcgcttatagacagtatccagtctcaggaggagattgaaagaacagaagttcagaaccttattttttccgagtatgaagcaaatggcatggaatcggacagtgaggggcagctgattccatggaacagcagggaaggaacatatcacttctttcaggacggcttatcaggatatgaggaacctcccgaagcaattgcagccgggaccgtttatgcttctccctccatggtttctgttatgggacttgaaataggggacaccatcacatttccggtggcaaggggtggggtcagcaggcagttcaccgttgccggatattatgaagatccttttatgggaagttctatgattggaatgaaagggtttctgatttcagcggaagattatgaagcaatccttcagaccgcccgggaagcgggcatggacagcctggtaagaggcggcgctatgatccatatttttacggatgacgtcagcaacagcgcatccggcattagcaggctcctgaatgaaaacacgccgatttcccaatatacggagtttatacatagcaaggaagcgatccttggctttatgagtattctgcaaaatgccttttgtgcgcttctggcggtctttgtgctgattctcctggcagcggccatggcagttctggggcacagcatcacaggcatggtggaacaggaatataagaacttgggggtcctaaaaacgacagggttt
